(19) United States
(12) Patent Application Publication
(10) Pub. No.: US 2023/0220425 A1
(43) Pub. Date: Jul. 13, 2023

(54) PAM-REDUCED AND PAM-ABOLISHED CAS DERIVATIVES COMPOSITIONS AND USES THEREOF IN GENETIC MODULATION

(71) Applicant: TARGETGENE BIOTECHNOLOGIES LTD, Kibbutz Magal (IL)

(72) Inventors: Yoel Moshe SHIBOLETH, Kibbutz Magal (IL); Dan Michael WEINTHAL, Rehovot (IL); Devin Lee TRUDEAU, Rehovot (IL); Talya KUNIK, Ramat Gan (IL); Mati COHEN, Ganei Tikva (IL)

(21) Appl. No.: 17/772,842

(22) PCT Filed: Oct. 28, 2020
(86) PCT No.: PCT/IL2020/051122

§ 371 Date: Apr. 28, 2022

Related U.S. Application Data
(60) Provisional application No. 62/926,764, filed on Oct. 28, 2019.
(60) Provisional application No. 63/068,060, filed on Aug. 20, 2020.

(51) Int. Cl. C12N 15/90; C12N 9/22; C12N 15/11; C12N 15/10; A61K 38/46

(52) U.S. Cl. CPC C12N 15/907; C12N 9/22; C12N 15/11; C12N 15/102; A61K 38/465; C12N 2310/20; C12N 2800/80

(57) ABSTRACT

The invention provides highly effective and versatile CRISPR/Cas protein variants, compositions, methods and uses thereof in gene editing. More specifically, the invention relates to PAM-reduced or PAM-abolished Cas proteins and chimeras, complexes and conjugates thereof, genetic editing systems and to therapeutic and non-therapeutic methods and uses of the PAM-reduced or PAM-abolished Cas proteins.

[0001] The Sequence Listing in ASCII text file format of 2,693,418 bytes in size, created on Oct. 6, 2022, with the file name “2022-11-30SequenceListing_SHIBOLETH1_ST25,” filed in the U.S. Patent and Trademark Office on even date herewith, is hereby incorporated herein by reference.

### FIELD OF THE INVENTION

[0002] The invention relates to genetic editing systems and methods. More specifically, the invention provides highly effective and versatile CRISPR/Cas protein variants, compositions, methods and uses thereof in gene editing.

### BACKGROUND ART

[0003] References considered to be relevant as background to the presently disclosed subject matter are listed below:

[0004] [1] Anders, C., et al (2014). Nature; 513(7519):569-73.

[0005] [2] Kleinstiver, et al (2015) Nature Biotechnology; 33, 1293-1298.

[0006] [3] Hirano, S., et 1(2016) Molecular Cell; Volume 61, Issue 6, 886-894.

[0007] [4] Hu, J. H., et al (2018) Nature; 556, 57-63.

[0008] [5] Nishimasu H, et al. (2018) Science; 361(6408): 1259-1262.

[0009] [6] Kleinstiver, B. P., et al (2015) Nature; 523, 481-485.

[0010] [7] Ma, D., et al (2019) Nature Communications; 10, Article number: 560.

[0011] [8] Tsai, S. Q., et al (2014) Nature Biotechnology; 32, 569-576.

[0012] [9] Chatterjee, P., et al (2018) Science Advances; Vol. 4, no. 10, eaau0766.

[0013] [10] Liu, Y., et al (2015) Current Pharmaceutical Design; Volume 21, Issue 22.

[0014] [11] Liu, J. J., et al (2019) Nature; 566, pages 218-223

[0015] Acknowledgement of the above references herein is not to be inferred as meaning that these are in any way relevant to the patentability of the presently disclosed subject matter.

### BACKGROUND OF THE INVENTION

[0016] CRISPR-Cas endonucleases are RNA/protein complexes that specifically recognize target DNA sequences and cleave them. All known CRISPR-Cas proteins have a requirement for a “protospacer adjacent motif” (PAM), a flanking DNA sequence either 5′ or 3′ of the target sequence. Different Cas proteins have different PAM-binding domains and recognize different PAM nucleotide sequences. For example, the PAM of Streptococcus pyogenes Cas9 (spCas9) is 5′-NGG-3′, the PAM of Streptococcus canis Cas9 (scCas9) is 5′-NNG-3′, the PAM of Streptococcus aureus Cas9 (saCas9) is 5′-NNGRRN-3′, the PAM of Streptococcus thermophilus Cas9 1 (st1Cas9) is 5′-NNAGAAW-3′, the PAM of Streptococcus thermophilus Cas9 3 (st3Cas9) is 5′-NGGNG-3′, the PAM of Neisseria meningitides Cas9 (nmCas9) is 5′-NNNNGATT-3′, the PAM of CasX from deltaproteobacteria is 5′-TTCN-3′, the PAM of Cas12a from Francisella tularensis is 5′-TTN-3′, the PAM of Cas12a from Acidaminococcus sp. is 5′-TTTN-3′, the PAM of Cas12a from Lachnospiraceae is 5′-TTTN-3′, the PAM of Cas14a1 is 5′-TTTN-3′, the PAM of Cas14b5 is 5′-TTAT-3′, the PAM of CasF-1 is 5′-VTTR-3′, the PAM of CasF-2 is 5′-TBN-3′, and the PAM of CasF-3 is 5′-VTTN-3′ . When applying Cas-based genome editing and designing sgRNAs for targeting specific genes, one must always take into account the availability of a PAM sequence adjacent to the target, thus limiting choice of target cleavage location. For example, SpCas9 requires NGG, N being any nucleotide and G a guanine. Thus, the chance of a randomly selected sequence being targetable by Cas9 is 1/4×1/4=1/16.

[0017] In a dead or deactivated nuclease Cas (dCas) fused to a FokI-nuclease (dCas-FokI) configuration, the target-choice limitation becomes even more pronounced due to PAMs being necessary at both chimeric-nuclease sites, restricting the theoretical choice to a 1/16×1/16=1/256 plus the requirement for a specific distance between the monomers on the DNA, or in other words, less than 4 times per kb of DNA (actual numbers may vary due to nucleotide distribution not being truly random, but this does not change the general conclusion). Thus, it is even more advantageous to reduce or abolish the PAM restriction when using dCas-FokI-nuclease configuration, which now benefits from less-restricted or totally unrestricted choice of target sequence respectively, but also has higher specificity due to use of two specificity-conferring nucleic acids (SCNAs, also known as “single guide RNAs”, sgRNAs).

[0018] Thus, while CRISPR based systems suffer from low specificity and dCas-FokI suffer from severe sgRNA design limitations, a PAM-reduced chimera would be less limited and a PAM-free dual RNA system does not suffer from either of these impediments and is thus inherently versatile, useful and safe.

[0019] PAM sequences are recognized by the PAM binding-domain of Cas proteins. In Cas9 proteins, specificity is mediated by an “RXR” motif (Arginine, any amino acid, Arginine): a pair of Arginines (Arg) that are predicted to interact with the guanines of the NGG sequence via hydrogen bonds [1]. In principle, mutating these sites or adjacent sites may change the specificity of Cas9 proteins towards PAM sequences. Researchers have succeeded in altering the PAM binding domain (PAMBD) of Cas proteins, however, attempts at deleting this domain or replacing it with alternative domains of other proteins, have not been reported.

[0020] Kleinstiver et al targeted the RXR motif and made various mutations that conferred different PAM specificities [2]. However, a mutation of any or both of the Arginines to Q (Gln) failed to show significant cleavage. Restoration of cleavage activity of a protein containing only the second Arg mutation was possible by introducing an Arg two amino acids towards the C terminus, which was later found to adopt a similar structural configuration to the canonical RXR motif [3]. However, they were not successful in removing the requirement for a PAM nor were they successful in removing the requirement for the Arginines in the PAMBD.

[0021] Hu et al. used phage-based selections to evolve an expanded PAM SpCas9 variant (xCas9) that can recognize a broad range of PAM sequences including NG, GAA and GAT [4]. Their selections did not target the RXR motif and instead focused on adjacent structural regions. Nishimasu et al. identified a SpCas9 mutant having expanded PAM recognition, cleaving TGA, TGT, and TGC targets in addition to the native NGG site [5]. Notably, R1333 is retained and R1335 function is replaced by R1337.

[0022] Staphyloccus aureus Cas9 has a NNGRRN PAM, and this recognition is mediated in part by a “RX24R” motif. A SaCas9 variant with E782K/N968K/R1015H triple mutations (SaCas9-KKH) recognizes NNNRRT PAM [6], while retaining the R991. This variant was further engineered by Ma et al. who identified several variants with expanded recognition capability at NNVRRN, NNVACT, NNVATG, NNVATT, NNVGCT, NNVGTG, and NNVGTT PAM sequences [7]. “V42” variant had R991K mutation but introduced L988R. “V17” variant had R9911, but introduced L989R. Thus, the dual arginine configuration was retained.

[0023] Protein DNA interaction may be mediated by alternative domains such as non-sequence specific DNA binding domains. DNA binding proteins (DBPs) are a class of proteins that bind DNA, in either a sequence specific fashion or a non-sequence specific fashion. Non-sequence specific DNA binding proteins/domains (NSDBs) interact non-specifically with DNA base and backbone elements. The use of Non-sequence specific DNA binding domains in engineering novel mutants of Cas proteins for genome editing has never been published.

[0024] Therefore, there is a need for reduction and abolishment of Cas PAM requirements, for the provision of effective but specific gene editing systems. The present invention addresses these needs by providing highly specific, versatile, effective and safe gene editing systems that display reduced or abolished PAM restriction.

### SUMMARY OF THE INVENTION

[0025] In a first aspect, the invention relates to a clustered regularly interspaced short palindromic repeats (CRISPR)-Cas protein or cas protein derived domain having reduced or abolished Protospacer Adjacent Motif (PAM) constraint or any variant, mutant, fusion/chimeric protein, complex or conjugate thereof. In more specific embodiments, at least one of the PAM binding domain (PAMBD or PBD) and/or PAM recognition motif, and/or the HNH-nuclease domain, any fragment of said PBD, and/or PAM recognition motif, and/or of the HNH-nuclease domain, and at least one amino acid residue adjacent to the PBD, and/or to the PAM recognition motif, and/or to the HNH-nuclease domain of the Cas protein is deleted, replaced, mutated or substituted.

[0026] In yet a further aspect, the invention provides a nucleic acid guided genome modifier or effector chimeric or fusion protein or any complex or conjugate thereof. More specifically, nucleic acid guided genome modifier/effector chimeric or fusion protein of the invention comprises:

[0027] (a) at least one Cas protein or any Cas protein derived domain having reduced or abolished PAM constraint or any variant, or mutant thereof. It should be noted that in some optional embodiments, at least one of: the PBD of the Cas protein, and/or the PAM recognition motif, and/or the HNH-nuclease domain of the Cas protein, any fragment of the PBD, and/or of the PAM recognition motif, and/or of the HNH-nuclease domain, and at least one amino acid residue adjacent to the PBD, and/or to the PAM recognition motif, and/or to the HNH-nuclease domain, is deleted, substituted, mutated or replaced; and

[0028] (b) at least one nucleic acid modifier or effector component.

[0029] In yet another aspect, the invention provides a nucleic acid molecule comprising a nucleic acid sequence encoding at least one Cas protein or any Cas protein derived domain, having reduced or abolished PAM constraint or any fragment, variant, mutant, fusion protein or conjugate thereof. It should be noted that in some optional embodiments, at least one of the PBD and/or the PAM recognition motif, and/or the HNH-nuclease domain of the Cas protein, any fragment of the PBD, and/or of the PAM recognition motif, and/or of the HNH-nuclease domain, and at least one amino acid residue adjacent to the PBD, and/or to the PAM recognition motif, and/or to the HNH-nuclease domain, is deleted, substituted, mutated or replaced.

[0030] A further aspect of the invention relates to a nucleic acid guided genome modifier/effector system. In more specific embodiments, the system of the invention comprises the following components: The first component (a), of the system of the invention may be at least one Cas protein or Cas protein derived domain, having reduced or abolished PAM constraint or any fragment, variant, mutant, fusion/chimeric protein, complex or conjugate thereof. Alternatively, the system of the invention may comprise at least one nucleic acid sequence encoding this Cas protein or any part thereof (e.g., N- and or C-terminal fragments thereof), variant, mutant, fusion/chimeric protein or conjugate thereof. It should be noted that in some optional embodiments, at least one of: at least one of the PBD and/or the PAM recognition motif, and/or the HNH-nuclease domain of the Cas protein, any fragment of the PBD, and/or of the PAM recognition motif, and/or of the HNH-nuclease domain, and at least one amino acid residue adjacent to the PBD, and/or to the PAM recognition motif, and/or to the HNH-nuclease domain, is deleted, substituted, mutated or replaced.

[0031] The second component (b), of the system of the invention may be at least one target recognition element, or alternatively, any nucleic acid sequence encoding the target recognition element.

[0032] In yet some further aspect thereof, the invention relates to a host cell that is either genetically modified by, or comprising at least one of:

[0033] (a) at least one Cas protein or any Cas derived domain having reduced or abolished PAM constraint or any variant, mutant, fusion/chimeric protein, complex or conjugate thereof, or alternatively, at least one nucleic acid sequence encoding the Cas protein or any fragment or parts thereof (N- and/or C terminal fragments thereof), variant, mutant, fusion/chimeric protein or conjugate thereof. It should be noted that in some optional embodiments, at least one of: the PBD and/or PAM recognition motif, and/or the HNH-nuclease domain of the Cas protein, any fragment of the PBD, and/or of the PAM recognition motif, and/or of the HNH-nuclease domain, and at least one amino acid residue adjacent to the PBD, and/or the PAM recognition motif, and/or to the HNH-nuclease domain of the Cas protein, is deleted, mutated, substituted or replaced.

[0034] (b) at least one target recognition element or any nucleic acid sequence encoding the target recognition element;

[0035] (c) at least one nucleic acid cassette or any vector or vehicle comprising the nucleic acid sequence of (a), the nucleic acid sequence of (b) or the nucleic acid sequence of (a) and (b); and

[0036] (d) at least one system comprising (a) and (b).

[0037] A further aspect of the invention relates to a composition comprising at least one of:

[0038] (a) at least one Cas protein or any Cas derived domain having reduced or abolished PAM constraint or any variant, mutant, fusion/chimeric protein, complex or conjugate thereof, or at least one nucleic acid sequence encoding the Cas protein or any fragment, part, variant, mutant, fusion/chimeric protein or conjugate thereof. It should be noted that in some optional embodiments, at least one of: the PBD and/or the PAM recognition motif, and/or the HNH-nuclease domain of the Cas protein, any fragment of the PBD, and/or of the PAM recognition motif, and/or of the HNH-nuclease domain, and at least one amino acid residue adjacent to the PBD, and/or to the PAM recognition motif, and/or to the HNH-nuclease domain, is deleted, substituted, mutated or replaced.

[0039] (b) at least one target recognition element or any nucleic acid sequence encoding such target recognition element.

[0040] (c) at least one nucleic acid cassette or any vector or vehicle comprising the nucleic acid sequence of (a), the nucleic acid sequence of (b) or the nucleic acid sequence of (a) and (b).

[0041] (d) at least one system comprising (a) and (b), and

[0042] (e) at least one host cell modified by, and/or comprising at least one of: the nucleic acid cassette or any vector or vehicle of (c) and the at least one system of (d);

[0043] or any matrix, nano- or micro-particle comprising at least one of (a), (b), (c), (d) and (e). It should be noted that the composition of the invention may optionally further comprises at least one of pharmaceutically acceptable carrier/s, diluent/s, excipient/s and additive/s.

[0044] In yet a further aspect, the invention provides a method of modifying at least one target nucleic acid sequence of interest in at least one cell. More specifically, the method may comprise the steps of contacting the cell with:

[0045] First (a), at least one Cas protein having reduced or abolished PAM constraint or any variant, mutant, fusion/chimeric protein, complex or conjugate thereof, or at least one nucleic acid sequence encoding said Cas protein or any fragment, part, variant, mutant, fusion/chimeric protein, complex or conjugate thereof. It should be noted that in some optional embodiments at least one of: the PBD and/or the PAM recognition motif, and/or the HNH-nuclease domain of the Cas protein, any fragment of the PBD, and/or of the PAM recognition motif, and/or of the HNH-nuclease domain, and at least one amino acid residue adjacent to the PBD, and/or to the PAM recognition motif, and/or to the HNH-nuclease domain, is deleted, substituted, mutated or replaced; and

[0046] Second (b), at least one target recognition element or any nucleic acid sequence encoding such target recognition element.

[0047] Alternatively, the method may contact the cell with (c), at least one nucleic acid cassette or any vector or vehicle comprising the nucleic acid sequence of (a), the nucleic acid sequence of (b) or the nucleic acid sequence of (a) and (b).

[0048] In yet some further embodiments (d), the cells may be contacted with at least one system or composition comprising (a) and (b).

[0049] A further aspect of the invention relates to a method of curing or treating, preventing, inhibiting, reducing, eliminating, protecting or delaying the onset of a pathologic disorder or condition in a subject in need thereof. More specifically, the method of the invention may comprise the steps of administering to the treated subject an effective amount of at least one of:

[0050] (a) at least one Cas protein or any Cas protein derived domain, having reduced or abolished PAM constraint or any fragment, variant, mutant, fusion/chimeric protein, complex or conjugate thereof, or alternatively or additionally, at least one nucleic acid sequence encoding the Cas protein or any fragment, part, variant, mutant, fusion/chimeric protein, complex or conjugate thereof. It should be noted that in some optional embodiments, at least one of: the PBD and/or the PAM recognition motif, and/or the HNH-nuclease domain of the Cas protein, any fragment of the PBD, and/or of the PAM recognition motif, and/or of the HNH-nuclease domain, and at least one amino acid residue adjacent to the PBD, and/or to the PAM recognition motif, and/or to the HNH-nuclease domain, is deleted, substituted, mutated or replaced;

[0051] (b) at least one target recognition element or any nucleic acid sequence encoding the target recognition element;

[0052] (c) at least one nucleic acid cassette or any vector or vehicle comprising the nucleic acid sequence of (a), the nucleic acid sequence of (b) or the nucleic acid sequence of (a) and (b);

[0053] (d) at least one system comprising (a) and (b);

[0054] (e) at least one host cell modified by and/or comprising at least one of: (a), (b), (c) and (d); and

[0055] (f) at least one composition comprising at least one of (a), (b), (c), (d) and (e).

[0056] Still further, another aspect of the invention relates to an effective amount of at least one of:

[0057] (a) at least one Cas protein or any Cas protein derived domain having reduced or abolished PAM constraint or any fragment, variant, mutant, fusion/chimeric protein, complex or conjugate thereof, or at least one nucleic acid sequence encoding said Cas protein or any variant, mutant, fusion/chimeric protein or conjugate thereof. More specifically, in some optional embodiments, at least one of: the PBD and/or the PAM recognition motif, and/or the HNH-nuclease domain of the Cas protein, any fragment of the PBD, and/or of the PAM recognition motif, and/or of the HNH-nuclease domain, and at least one amino acid residue adjacent to the PBD, and/or to the PAM recognition motif, and/or to the HNH-nuclease domain, is deleted, substituted, mutated or replaced;

[0058] (b) at least one target recognition element or any nucleic acid sequence encoding said target recognition element;

[0059] (c) at least one nucleic acid cassette or any vector or vehicle comprising the nucleic acid sequence of (a), the nucleic acid sequence of (b) or the nucleic acid sequence of (a) and (b);

[0060] (d) at least one system comprising (a) and (b);

[0061] (e) at least one host cell modified by, and/or comprising at least one of: (a), (b), (c) and (d); and

[0062] (f) at least one composition comprising at least one of (a), (b), (c), (d) and (e); for use in methods of curing or treating, preventing, inhibiting, reducing, eliminating, protecting or delaying the onset of a pathologic disorder or condition in a subject in need thereof.

[0063] In yet some further aspects thereof, the invention provides an effective amount of at least one of:

[0064] (a) at least one Cas protein or any Cas protein derived domain having reduced or abolished PAM constraint or any fragment, variant, mutant, fusion/chimeric protein, complex or conjugate thereof, or at least one nucleic acid sequence encoding said Cas protein or any variant, mutant, fusion/chimeric protein or conjugate thereof. More specifically, in some optional embodiments, at least one of: the PBD and/or the PAM recognition motif, and/or the HNH-nuclease domain of the Cas protein, any fragment of the PBD, and/or of the PAM recognition motif, and/or of the HNH-nuclease domain, and at least one amino acid residue adjacent to the PBD, and/or to the PAM recognition motif, and/or to the HNH-nuclease domain, is deleted, substituted, mutated or replaced;

[0065] (b) at least one target recognition element or any nucleic acid sequence encoding the target recognition element;

[0066] (c) at least one nucleic acid cassette or any vector or vehicle comprising the nucleic acid sequence of (a), the nucleic acid sequence of (b) or the nucleic acid sequence of (a) and (b);

[0067] (d) at least one system comprising (a) and (b); and

[0068] (e) at least one composition comprising at least one of (a), (b), (c), and (d); for use in method of modifying at least one target nucleic acid sequence of interest in at least one cell.

### BRIEF DESCRIPTION OF THE DRAWINGS

[0069] In order to better understand the subject matter that is disclosed herein and to exemplify how it may be carried out in practice, embodiments will now be described, by way of non-limiting example only, with reference to the accompanying drawings, in which:

[0070] FIG. 1A-1D: Droplet digital (ddPCR) analysis of the EMX1 gene targeting in human cells

[0071] FIG. 1A: Graph showing positive control SpCas9 with a single EMX1 sgRNA. Calculated Non-homologous end joining (NHEJ) erroneous repair (ER) efficiency percentage of total accepted droplets.

[0072] FIG. 1B: Graph showing tested dead ScCas9-FokI combined with (or without) a pair of SCNAs (sgRNAs) situated at gaps of 15 or 27 bases apart. Calculated NHEJ-ER percentage of total accepted droplets.

[0073] FIG. 1C-1D: Graphs showing highly efficient human genome editing (upper panel (1C): correctly spaced 15 nt gap pair of SCNAs) and no editing detected (lower panel (1D): wrongly spaced 27 nt gap pair of SCNAs). Raw data for the calculation of FIG. 1B. Threshold crosshairs were placed identically for both treatments. Circled top left quarter droplets are erroneous repair products of NHEJ at the intended target site and are droplets containing a single template. Droplets containing more than one template of which one or more are WT and at least one is mutated, are present in the clearly visible “tail” to the right of these droplets included in the circle and in the top right panel.

[0074] FIG. 2: Schematic representation of a chimeric dCas-FokI construct bound to DNA target site

[0075] A protein comprising a Nuclear Localization Sequence (NLS), FokI nuclease monomer (FokI), nuclease-deficient Cas nucleoprotein (dCas), and a non-sequence-specific DNA-binding domain (NSDB), bound to a single guide RNA (sgRNA), is shown bound to a DNA target site that is complementary to the sgRNA. Two monomers of this protein are bound to DNA target sites separated by a double-stranded gap region (dsDNA), positioning the FokI domains for dimerization and cleavage.

[0076] FIG. 3: Comparison of NHEJ erroneous repair percentages in the human Myeloperoxidase (MPO) gene for dScCas9-FokI derivatives wherein two domains have been deleted

[0077] The figure shows comparison of NHEJ erroneous repair percentages in the targeted human Myeloperoxidase (MPO) gene assayed by ddPCR for different dScCas9-FokI derivatives at two timepoints (76 hrs [wavy fill] or 120 hrs [hatched fill] post transfection) in two separate biological experiments. All constructs in the figure have an NNG PAM, a combination of an SV40 and an SV40-derived bipartite Nuclear Localization Signal (NLS), a deletion of the scLoop and the RuvC+Rec1/2 domain (“Ancestor Rec”) ancestral mutations as described in Table 10C and in Example 2. Constructs were delivered by plasmid into Hek293 cells together with a plasmid encoding a pair of SCNAs (sgRNAs). Different constructs denoted by their “TG number” (as can be found also in table 10C) have different combinations of differently altered domains. Ancestral RuvC+Rec1/2 domain (“Ancestor Rec”) is as described in Example 16; Wild type (wt) HNH is the HNH domain of scCas9; HNH deletion is a protein wherein the wt HNH domain has been deleted.

[0078] FIG. 4: Comparison of NHEJ erroneous repair percentages in the human Myeloperoxidase (MPO) gene for dScCas9-FokI derivatives lacking both a native PAM-binding domain (PAMBD) and a native scLoop

[0079] The figure shows comparison of NHEJ erroneous repair percentages in the targeted human Myeloperoxidase (MPO) gene assayed by ddPCR for different dScCas9-FokI derivatives at two timepoints (76 hrs [black] or 120 hrs [white] post transfection) in two separate biological experiments. All constructs have had the native PAM binding domain [PAMBD] replaced with the domain indicated: Zinc Finger (ZF), LacI (Lac), SSo7D, HMGN or STO7 all as described in Example 2. All constructs have a mutated ScCas9 “scLoop”, an SV40-Nuclear Localization Signal (NLS) combined with a nucleoplasmin NLS, an HNH deletion and the ancestral RuvC+Rec1/2 mutations as described in Example 16. Constructs were delivered by plasmid into Hek293 cells together with a plasmid encoding a pair of SCNAs (sgRNAs). Different constructs denoted by their “TG number” (as can be found also in Table 10C) have different combinations of altered domains. Ancestral RuvC+Rec1/2 (“Ancestral mutations”) is as described in Example 16; Del HNH is a protein wherein the wt HNH of scCas9 has been deleted; wt FokI is the FokI-nuclease domain of FokI.

[0080] FIG. 5A-5B: Comparison of NHEJ erroneous repair percentages in the human EMX1 gene for dScCas9-FokI and dScCas9-FokI dHNH

[0081] The figure shows comparison of NHEJ erroneous repair percentages in the human Homeobox 1(EMX1) gene assayed by ddPCR for dScCas9-FokI and dScCas9-FokI dHNH (both with NNG PAM) with a pair of SCNAs (sgRNAs) at 2 different gaps compared to SpCas9 (NGG PAM) with a single sgRNA.

[0082] FIG. 5A: Graph showing tested dScCas9-FokI and dScCas9-FokI dHNH combined with (or without) a pair of SCNAs (sgRNAs) situated at gaps of 15 or 27 bases apart. Calculated percentage of total accepted droplets. Positive control spCas9 with a single EMX1 sgRNA. Calculated percentage of total accepted droplets. Results show highest activity for SpCas9 (single sgRNA), somewhat lower for dScCas9-Fok combined with a pair of SCNAs spaced 15 nucleotide (nt) apart, lower yet significant activity for dScCas9 dHNH-Fok combined with a pair of SCNAs spaced 15 nt apart and greatly reduced activity with a 27 nt gap.

[0083] FIG. 5B: Graphs (5B-1, 5B-2, 5B-3, 5B-4) showing raw data for the calculation of FIG. 3A. Threshold crosshairs were placed identically for all treatments as marked in the figure except SpCas9 and which was analyzed with a second assay (NGG target not being available at the NNG target). Top left quarter droplets are erroneous repair products of NHEJ at the intended target site and are droplets containing a single template. Droplets containing more than one template of which one or more are WT are present in the clearly visible “tail” to the right of these droplets.

[0084] FIG. 6: Targeting the RHO gene by the editing system of the invention

[0085] The figure illustrates the target sequence within exon 1 of the RHO gene of SEQ ID NO. 214, targeted by the SCNA of SEQ ID NOs. 215, 216 of set 1, and of SEQ ID NOs. 217 and 218, of set 2. The 5′ to 3′ upper sequence in the figure is denoted by the nucleic acid sequence SEQ ID NO. 416, the 3′ to 5′ lower sequence in the figure is sequence in the figure is denoted by the nucleic acid sequence SEQ ID NO. 417.

[0086] FIG. 7: Targeting the COMP gene by the editing system of the invention

[0087] The figure illustrates the target sequence within exon 1 of the COMP gene of SEQ ID NO. 219, targeted by the SCNA of SEQ ID NOs. 220, 221 of set 1. The 5′ to 3′ upper sequence in the figure is denoted by the nucleic acid sequence SEQ ID NO. 418, the 3′ to 5′ lower sequence in the figure is denoted by the nucleic acid sequence SEQ ID NO. 419.

[0088] FIG. 8: Targeting the PDCD1 gene by the editing system of the invention

[0089] The figure illustrates the target sequence within exon 1 of the PDCD1 gene of SEQ ID NO. 222, targeted by the SCNA of SEQ ID NOs. 223, 224 of set 1, and of SEQ ID NOs. 225 and 226, of set 2. The 5′ to 3′ upper sequence in the figure is denoted by the nucleic acid sequence SEQ ID NO. 420, the 3′ to 5′ lower sequence in the figure is denoted by the nucleic acid sequence SEQ ID NO. 421, the amino acid sequence in the figure is denoted by SEQ ID NO. 422.

[0090] FIG. 9A-9B: Targeting the CTLA4 gene by the editing system of the invention

[0091] The figure illustrates the target sequence within exon 1 of the CTLA4 gene of SEQ ID NO. 227, targeted by the SCNA of SEQ ID NOs. 228, 229 of set 1 (FIG. 9A), and of SEQ ID NOs. 230 and 231, of set 2 (FIG. 9B). The 5′ to 3′ upper sequence in FIG. 9A is denoted by the nucleic acid sequence SEQ ID NO. 493, the 3′ to 5′ lower sequence in FIG. 9A is denoted by the nucleic acid sequence SEQ ID NO. 494, the 5′ to 3′ upper sequence in the FIG. 9B is denoted by the nucleic acid sequence SEQ ID NO. 495, and the 3′ to 5′ lower sequence in FIG. 9B is denoted by the nucleic acid sequence SEQ ID NO. 496.

[0092] FIG. 10: Targeting the SIGLEC10 gene by the editing system of the invention

[0093] The figure illustrates the target sequence within exon 1 of the SIGLEC10 gene of SEQ ID NO. 232, targeted by the SCNA of SEQ ID NOs. 233, 234 of set 1, and of SEQ ID NOs. 235 and 236 of set 2, and of SEQ ID NOs. 237 and 238, of set 3, and of SEQ ID NOs. 239 and 240 of set 4, and of SEQ ID NOs. 241 and 242 of set 5. The 5′ to 3′ upper sequence in the figure is denoted by the nucleic acid sequence SEQ ID NO. 497, the 3′ to 5′ lower sequence in the figure is denoted by the nucleic acid sequence SEQ ID NO. 498.

[0094] FIG. 11: Targeting the ITGB3 gene by the editing system of the invention

[0095] The figure illustrates the target sequence within exon 1 of the ITGB3 gene of SEQ ID NO. 243 targeted by the SCNA of SEQ ID NOs. 244, 245 of set 1, and of SEQ ID NOs. 246 and 247 of set 2, and of SEQ ID NOs. 248 and 249 of set 3, and of SEQ ID NOs. 250 and 251 of set 4, and of SEQ ID NOs. 252 and 253 of set 5. The 5′ to 3′ upper sequence in the figure is denoted by the nucleic acid sequence SEQ ID NO. 499, the 3′ to 5′ lower sequence in the figure is denoted by the nucleic acid sequence SEQ ID NO. 500.

[0096] FIG. 12: Targeting the CTLA4 gene by the editing system of the invention

[0097] The figure illustrates the target sequence within exon 1 of the CTLA4 gene of SEQ ID NO. 285 targeted by the SCNA of SEQ ID NOs. 286, 287. The 5′ to 3′ upper sequence in the figure is denoted by the nucleic acid sequence SEQ ID NO. 501, the 3′ to 5′ lower sequence in the figure is denoted by the nucleic acid sequence SEQ ID NO. 502.

[0098] FIG. 13: CAR-T expression cassette for PDCD-1 exon 1 integration

[0099] The figure illustrates the sequence map of the CAR-T cassette SEQ ID NO. 293 for integration within exon 1 of the PDCD-1 gene exon 1 shown in FIG. 8. The cassette is composed of a Left homology arm to the PDCD-1 locus, a CMV enhancer and promoter, an N-terminal leader, an anti-NY ESO scfv, IgG4 scaffold, CD8-TM, CD28 signaling domain, CD3zeta signaling domain, BGH terminator, and Right homology arm to the PDCD-1 locus.

[0100] FIG. 14: Comparison of NHEJ erroneous repair percentages in the human Myeloperoxidase (MPO) gene for dScCas9-FokI derivatives

[0101] The figure shows comparison of NHEJ erroneous repair percentages in the targeted human Myeloperoxidase (MPO) gene assayed by ddPCR for different dScCas9-FokI derivatives at two timepoints (76 hrs or 120 hrs post transfection) in two separate biological experiments. All constructs except where noted here have an NNG PAM, Wild-type ScCas9 “scLoop”, and a combination of an SV40 and an SV40-derived bipartite Nuclear Localization Signal (NLS). Nuclease (nucl) expressing constructs were delivered by plasmid into Hek293 cells together with a plasmid encoding a pair of SCNAs (sgRNAs) compared to SpCas9 (NGG PAM) with a single sgRNA. Different constructs denoted by their “TG number” (as can be found also in table 18) have different combinations of altered domains. Wt Rec is the dead Rec domain of dscCas9; ancestral Rec (Ancestor) is as described in Example 16; wt HNH is the HNH domain of scCas9; Del HNH is a protein wherein the wt HNH has been deleted as described in Example 2; wt FokI is the FokI-nuclease domain of FokI; FokI enhanced is as described in Example 16; Fold consensus is as described in Example 16. Tag is 6His-Tag (6H) or none (−).

[0102] FIG. 15: Split Intein delivery with a reduced PAM dual-RNA guided ribonucleoprotein.

[0103] Cells were transfected with double plasmid concentrations of one of each half Intein (TG14806 and TG14870) or with a combination of both together at a similar total concentration of plasmid. An sgRNA pair was delivered by plasmid 12696 targeting Myeloperoxidase (MPO) exon 1. Controls include TG11241, TG12480 and spCas9. ddPCR was done using assay TGEE6 with primers 3261 and 3266. Reference probe was 3289 and drop-off probe was 3291.

### DETAILED DESCRIPTION OF THE INVENTION

[0104] The present invention provides a nucleic acid guided genome effector or modifier protein having reduced or abolished Protospacer Adjacent Motif (PAM) restriction or constraint, as well as variants, mutants, fusion proteins and conjugates thereof. It should be noted that the effector or modifier protein of the invention may comprise at least one clustered regularly interspaced short palindromic repeats (CRISPR)-Cas protein or Cas protein derived domain. In some embodiments, the PAM binding domain/PAM recognition motif of the Cas protein of the invention, may be deleted or replaced. These improved Cas proteins or Cas derived domain disclosed by the invention enable reduction and abolishment of Cas PAM requirements, and thereby the provision of highly specific, versatile, effective but specific gene editing systems, compositions and methods.

[0105] Thus, in a first aspect, the invention relates to a CRISPR-Cas protein or cas protein derived domain having reduced or abolished Protospacer Adjacent Motif (PAM) constraint or any fragment, variant, mutant, fusion/chimeric protein, complex or conjugate thereof. In more specific embodiments, at least one of the PAM binding domain (PBD) and/or the PAM recognition motif, and/or the HNH-nuclease domain of the Cas protein, any fragment of the PBD, and/or of the PAM recognition motif, and/or of the HNH-nuclease domain, and at least one amino acid residue adjacent to the PBD, and/or to the PAM recognition motif, and/or to the HNH-nuclease domain, is deleted, substituted, mutated or replaced.

[0106] The protospacer adjacent motif (PAM), as used herein, is a short DNA sequence (usually 2-6 base pairs in length) that follows the DNA region targeted for cleavage by the CRISPR system, serving as a binding signal. The PAM is required for a Cas nuclease to cut and is generally found 3-4 nucleotides downstream from the cut site. The canonical PAM (of SpCas9) is the sequence 5′-NGG-3′ where “N” is any nucleobase followed by two guanine (“G”) nucleobases. This short DNA sequence, the PAM, is frequently used to mark proper target sites and discriminate between ‘self’ and ‘non-self’ potential target sequences.

[0107] The Cas proteins provided by the invention display reduced or abolished PAM restriction, constraint, requirement or limitation. More specifically, a Cas protein displaying a “PAM-reduced” or “PAM abolished” requirement, restriction, constraint, requirement or limitation as used herein, is considered as a Cas protein having either (a) a less stringent PAM requirement than that of the wild-type PAM requirement of the corresponding wild-type Cas protein; or (b) substitution of a PAM-requiring Cas protein by a less stringent Cas protein or portion thereof. It should be noted that the fewer nucleotides that are required for recognition, the less stringent the PAM, is. In some embodiments, PAM-reduced or abolished Cas protein may require three or less, two or less or one or less nucleotides in a PAM sequence adjacent to the target site. In certain embodiments, PAM-reduced or abolished Cas protein binds the target site recognized by the targeting elements, with no further requirements of specific nucleotides in sequences adjacent to the target site. In some embodiments a PAM -reduced Cas protein, may be a protein that display reduced restriction, constraint, requirement or limitation in about 1%, 2%, 3%, 4%, 5% to about 100%, specifically, about 5% to about 10%, about 10% to about 15%, about 15% to about 20%, about 20% to about 25%, about 25% to about 30%, about 35% to about 40%, about 40% to about 45%, about 45% to about 50%, about 50% to about 55%, about 55% to about 60%, about 65% to about 70%, about 75% to about 80%, about 80% to about 85%, about 85% to about 90%, about 90% to about 95%, about 95% to about 99.9%, more specifically, reduced, inhibited, decreased, eliminated, restriction, constraint, requirement or limitation of about 98% to about 100% as compared to that of the wild-type PAM requirement of the corresponding wild-type Cas protein. More specifically, a protein that display reduced restriction, constraint, requirement or limitation in aboutl%, 2%, 3%, 4%, 5%, 6%, 7%, 8%, 9%, 10%, 11%, 12%, 13%, 14%, 15%, 16%, 17%, 18%, 19%, 20%, 21%, 22%, 23%, 24%, 25%, 26%, 27%, 28%, 29%, 30%, 31%, 32%, 33%, 34%, 35%, 36%, 37%, 38%, 39%, 40%, 41%, 42%, 43%, 44%, 45%, 46%, 47%, 48%, 49%, 50%, 51%, 52%, 53%, 54%, 55%, 56%, 57%, 58%, 59%, 60%, 61%, 62%, 63%, 64%, 65%, 66%, 67%, 68%, 69%, 70%, 71%, 72%, 73%, 74%, 75%, 76%, 77%, 78%, 79%, 80%, 81%, 82%, 83%, 84%, 85%, 86%, 87%, 88%, 89%, 90%, 91%, 92%, 93%, 94%, 95%, 96%, 97%, 98%, 99% , 99.9%, 99.99%, 99.999%, 99.9999% or about 100%, as compared to that of the wild-type PAM requirement of the corresponding wild-type Cas protein. It should be further noted that a “PAM-free” system would have no PAM requirement. Thus, in some embodiments, the invention further provides Cas protein variants that display no PAM requirement, referred to herein as PAM-abolished or PAM-free Cas proteins.

[0108] As indicated above, the invention provides Cas protein-derived domains that display PAM-reduced or abolished PAM restriction, constraint, requirement or limitation. In some embodiments such domain may comprise any domain of the Cas protein that maintain the ability of such Cas protein to bind at least one target recognition element (e.g., gRNA) as will be discussed herein after, that guide and direct the Cas protein to a predetermined target nucleic acid sequence. In some embodiments, a cas-protein-derived domain applicable in the present invention may be any protein fragment of Cas comprising between about 50 to 500 amino acid residues or more, that display at least 50-100% homology or identity to at least 50 consecutive amino acid residues of the entire Cas-protein. In some more specific embodiments, the invention provides PAM abolished or reduced CRISPR-Cas proteins that may be any member of a clustered regularly interspaced short palindromic repeat (CRISPR) Class 2 or Class 1 system. The Clustered Regularly Interspaced Short Palindromic Repeats (CRISPR) system is a bacterial immune system that has been modified for genome engineering. CRISPR-Cas systems fall into two classes. Class 1 systems use a complex of multiple Cas proteins to degrade foreign nucleic acids. Class 2 systems use a single large Cas protein for the same purpose. More specifically, Class 1 may be divided into types I, III, and IV and class 2 may be divided into types II, V, and VI.

[0109] It should be understood that the invention contemplates the use of any of the known CRISPR systems, particularly and of the CRISPR systems disclosed herein. The CRISPR-Cas system has evolved in prokaryotes to protect against phage attack and undesired plasmid replication by targeting foreign DNA or RNA. In bacterial immunity, the CRISPR-Cas system, targets DNA molecules based on short homologous DNA sequences, called spacers that have previously been extracted by the bacterium from the foreign pathogen sequence and inserted between repeats as a memory system. These spacers are transcribed and processed and this RNA, named crRNA or guide-RNA (gRNA), guides CRISPR-associated (Cas) proteins to matching (and/or complementary) sequences within the foreign DNA, called proto-spacers, which are subsequently cleaved. The spacers, or other suitable constructs or RNAs can be rationally designed and produced to target any DNA sequence. Moreover, this recognition element may be designed separately to recognize and target any desired target including outside of a bacterium.

[0110] “Complement” or “complementary” as used herein means Watson-Crick (e.g., A-T/U and C-G) or Hoogsteen base pairing between nucleotides or nucleotide analogs of nucleic acid molecules. A full complement or fully complementary may mean 100% complementary base pairing between nucleotides or nucleotide analogs of nucleic acid molecules. Partial complementary may mean less than 100% complementarity, for example 80% complementarity,

[0111] In some specific embodiment, the PAM abolished or reduced CRISPR-Cas proteins of the invention may be of a CRISPR Class 2 system. In yet some further particular embodiments, such class 2 system may be any one of CRISPR type II, and type V systems. In certain embodiments, the Cas applicable in the present invention may be any Cas protein of the CRISPR type II system. In more specific embodiments, the nucleic acid guided DNA binding protein nuclease may be CRISPR-associated endonuclease 9 (Cas9) system. The type II CRISPR—Cas systems include the ‘HNH’-type system (Streptococcus-like; also known as the Nmeni subtype, for Neisseria meningitidis serogroup A str. Z2491, or CASS4), in which Cas9, a single, very large protein, seems to be sufficient for generating crRNA and cleaving the target DNA, in addition to the ubiquitous Cast and Cas2. Cas9 contains at least two nuclease domains, a RuvC-like nuclease domain near the amino terminus and the HNH (or McrA-like) nuclease domain in the middle of the protein. It should be appreciated that any type II CRISPR-Cas systems may be applicable in the present invention, specifically, any one of type II-A or B. Thus, in yet some further and alternative embodiments, at least one cas gene used in the methods and systems of the invention may be at least one cas gene of type II CRISPR system (either typeII-A or typeII-B). In more particular embodiments, at least one cas gene of type II CRISPR system used by the methods and systems of the invention may be the cas9 gene.

[0112] Thus, according to such embodiments, the PAM abolished or reduced CRISPR-Cas proteins of the invention is a CRISPR-associated endonuclease 9 (Cas9). Double-stranded DNA (dsDNA) cleavage by Cas9 is a hallmark of “type II CRISPR-Cas” immune systems. The CRISPR-associated protein Cas9 is an RNA-guided DNA endonuclease that uses RNA:DNA complementarity to a target site (proto-spacer). After recognition between Cas9 and the target sequence double stranded DNA (dsDNA) cleavage occur, creating the double strand breaks (DSBs).

[0113] CRISPR type II system as used herein requires the inclusion of two essential components: a “guide” RNA (gRNA) and a CRISPR-associated endonuclease (Cas9). The gRNA is an RNA molecule composed of a “scaffold” sequence necessary for Cas9-binding (also named tracrRNA) and about 20 nucleotide long “spacer” or “targeting” sequence, which defines the genomic target to be modified. Guide RNA (gRNA), as used herein refers to a synthetic fusion or alternatively, annealing of the endogenous tracrRNA with a targeting sequence (also named crRNA), providing both scaffolding/binding ability for Cas9 nuclease and targeting specificity. Also referred to as “single guide RNA” or “sgRNA” or as a specificity conferring nucleic acid (SCNA).

[0114] In yet some further particular embodiments, the class 2 system in accordance with the invention, may be a CRISPR type V system. In a more specific embodiment, the RNA guided DNA binding protein nuclease may be CRISPR-associated endonuclease X (CasX) system or CRISPR-associated endonuclease 14 (Cas14) system or CRISPR-associated endonuclease F (CasF, also known as Cas12j) system. The type V CRISPR—Cas systems are distinguished by a single RNA-guided RuvC domain-containing nuclease. As with type II CRISPR-Cas systems, CRISPR type V system as used herein requires the inclusion of two essential components: a gRNA and a CRISPR-associated endonuclease (CasX/Cas14/CasF). The gRNA is a short synthetic RNA composed of a “scaffold” sequence necessary for CasX/Cas14/CasF-binding and about 20 nucleotide long “spacer” or “targeting” sequence, which defines the genomic target to be modified.

[0115] As discussed herein, in some embodiments, the PAM-reduced or abolished Cas protein of the invention may comprise at least one of, deletion, substitution, mutation or replacement of at least one of, the PAM binding domain (PBD), and/or the PAM recognition motif, or deletion, substitution, mutation or replacement in any fragments thereof, or in any amino acid residue thereof, or in any adjacent amino acid residue/s thereof. As used herein, a “PAM binding domain” or a “PAM binding motif” of the CRISPR-Cas protein of the present disclosure, refers to any amino acid residue or to any sequence, secondary structure and/or three dimensional tertiary structure (formed by either proximate or distant residues) that is involved or participates directly or indirectly in recognition and binding of the PAM in the target nucleic acid sequence. The “PAM binding domain” or a “PAM binding motif” may therefore comprise at least one amino acid residue, a linear peptide composed of two or more residues, any secondary or three dimensional tertiary structure formed by at least two amino acid residues located either in close proximity in a linear sequence or located at distant parts or domain of the protein. In some embodiments, the “PAM binding domain” or a “PAM binding motif” of the CRISPR-Cas protein of the present disclosure may involve residues derived from the N-terminal and/or the C-terminal parts of the proteins forming a structure that participates in PAM binding and recognition. The “PAM binding domain” or the “PAM binding motif” of the CRISPR-Cas protein of the present disclosure may comprise in some embodiments at least one of loop/s, alpha helix/helices, beta sheet/s and any combinations thereof. In some embodiments, the “PAM binding domain” or “PAM binding motif” of the Cas protein used by the present disclosure may comprise at least two loop structures. More specifically, such loops may include in some embodiments a loop referred to herein as the “PAM BD loop” that is comprised within the PAM binding domain of the Cas protein (derived from the C′ terminal part of the protein), and at least one additional structure derived from a distant part of the Cas protein (the N terminal part of the protein), for example, a loop structure referred to herein as the “ScLoop”. In some embodiments, the “PAM binding domain” in accordance with the present disclosure comprises the PAM BD loop. Such domain may comprise residues from about position 1108+/−10 amino acid residues, to about position 1375+/−10 amino acid residues. In some embodiments, the PAM binding domain of ScCas9 may comprise, or may be comprised within residues Glu1108 to Asp1375 of the ScCas9, as denoted by SEQ ID NO. 258. In yet some further specific embodiments, residues Glu1108 to Asp1375 of SEQ ID NO. 258, may comprise the amino acid sequence as denoted by SEQ ID NO. 503, and any variants and homologs thereof. Still further, in some embodiments this domain of Cas may comprise the “PAM binding domain”, that may comprise residues from about position 1228+/−10 amino acid residues, to about position 1343+/−10 amino acid residues. In yet some further embodiments, such sequence may be referred to herein as the “PAM binding domain”, “PAM PBD” “the whole PAM PBD”, “the entire PAM PBD”. In more specific embodiments, the PAM PBD may comprise the sequence of residues Glu1228 to Tyr1343 of the ScCas9 as denoted by SEQ ID NO. 258. In yet some further embodiments, the PAM PBD of ScCas9 may comprise the amino acid sequence as denoted by SEQ ID NO. 504, and any variants and homologs thereof. In yet some further embodiments, the PAM PBD of ScCas9 may comprise the PAM BD loop. In some embodiments, such PAM BD loop may comprise residues from about position 1330+/−10 amino acid residues, to about position 1342+/−10 amino acid residues. In certain embodiments, the PAM BD loop may comprise the sequence of residues Thr1330 to Arg1342 of the ScCas9 as denoted by SEQ ID NO. 258. In some specific embodiments, the PAM BD loop may comprise the sequence as denoted by SEQ ID NO. 505, and any variants and homologs thereof. Still further, in some embodiments the “PAM binding motif” of the invention may comprise a second loop, referred to herein as the “ScLoop”. In more specific embodiments such loop may comprise the amino acid residues from position 367+/−10 amino acid residues, to about position 376+/−10 amino acid residues. In certain embodiments, the “ScLoop” may comprise the sequence of residues Ile367 to Ala376 of the ScCas9 as denoted by SEQ ID NO. 258. In some specific embodiments, the PAM “ScLoop” may comprise the sequence as denoted by SEQ ID NO. 291, and any variants and homologs thereof.

[0116] Thus, in some embodiments, the CRISPR-Cas protein of the invention may be at least one of Cas9, CasX, Cas14a1, Cas14b5, CasF-1, CasF-2, CasF-3, an ancestral Cas9 and Cas12a.

[0117] In more specific embodiments, the CRISPR-Cas protein of the invention is at least one of Streptococcus canis Cas9 (ScCas9), Streptococcus pyogenes Cas9 (SpCas9), an ancestral Cas9, deltaproteobacteria CasX, Cas12a, Cas14a1, or Cas14b5. In some specific embodiments, at least one PAM-interacting Arginine and/or Lysine residue of the PBD of the Cas proteins is either deleted or replaced by at least one amino acid residue.

[0118] In some specific embodiments, the Cas9 of Streptococcus canis may be applicable as the PAM abolished or reduced CRISPR-Cas protein of the invention. In some embodiments, the Cas9 protein may be the protein sequence denoted by SEQ ID NO. 258. In some embodiments, the Cas protein used by the invention is the ScCas9, where the RXR motif of the PAM binding domain of said Cas is deleted or replaced.

[0119] Nevertheless, it should be appreciated that any known Cas9 may be applicable. Non-limiting examples for Cas9 useful in the present disclosure include but are not limited to Streptococcus pyogenes (SP), also indicated herein as SpCas9, Staphylococcus aureus (SA), also indicated herein as SaCas9, Neisseria meningitidis (NM), also indicated herein as NmCas9, Streptococcus thermophilus (ST), also indicated herein as StCas9 and Treponema denticola (TD), also indicated herein as TdCas9. In some specific embodiments, the Cas9 of Streptococcus pyogenes M1 GAS, specifically, the SpCas9 of protein id: AAK33936.1, may be applicable as the PAM abolished or reduced CRISPR-Cas protein of the invention. In some embodiments, the Cas9 protein may be the protein sequence as denoted by SEQ ID NO. 257. In yet some further specific embodiments, the RXR motif of the PAM binding domain of spCas9 is deleted or replaced, thereby providing the PAM-reduced or abolished Cas protein of the invention.

[0120] In yet some further embodiments, the Streptococcus aureus Cas9 (saCas9) as denoted by SEQ ID NO. 313 protein may be applicable as the PAM abolished or reduced CRISPR-Cas protein of the invention. In more specific embodiments, the RXR motif of the PAM binding domain of said Cas protein is deleted or replaced.

[0121] Still further, CasX may be used as the PAM abolished or reduced CRISPR-Cas proteins of the invention. More specifically, CasX was identified by metagenomic analysis of bacteria from groundwater and characterized as an RNA-guided DNA nuclease. It recognizes a 5′-TTCN PAM. It shares no similarity to other reported Cas endonucleases except for a RuvC domain located at the C-terminus. The above features of CasX correlate with those of type V Cas12; however, the size of CasX (-980 aa) is smaller than those of reported Cas12 (˜1200 aa). For example, sgRNA-bound Deltaproteobacteria CasX (DpbCasX) contains 20-nt guide segment and recognizes a TTCN PAM element resulting in dsDNA target cleavage with 10-nt staggered ends. Another example of CasX i.e. Planctomycetes CasX (P1mCasX). In some embodiments, the CasX protein may be the protein sequence as denoted by SEQ ID NO. 269. In some embodiments, wherein the Cas protein used for the PAM-abolished or reduced Cas protein of the invention is CasX, the PAM interacting Lysine of such Cas, is replaced.

[0122] In some embodiments, wherein the Cas protein used for the PAM-abolished or reduced Cas protein of the invention is Cas14a1, the PBD of such Cas protein includes residues 1-266, of the amino acid sequence as denoted by SEQ ID NO. 308.

[0123] In some embodiments, wherein the Cas protein used for the PAM-abolished or reduced Cas protein of the invention is Cas14b5, the PBD of such Cas protein includes residues 1-300, of the amino acid sequence as denoted by SEQ ID NO. 309.

[0124] In some embodiments, wherein the Cas protein used for the PAM-abolished or reduced Cas protein of the invention is Cas12a, the PBD of such Cas protein includes residues 663-761 and 601-642, of the amino acid sequence as denoted by SEQ ID NO. 310 (Cas12a from Francisella tularensis), or residues 536-577 and 599-718 of the amino acid sequence as denoted by SEQ ID NO. 311 (Cas12a from Acidaminococcus sp), or residues 527-568 and 588-678 of the amino acid sequence as denoted by SEQ ID NO. 312 (Cas12a from Lachnospiraceae bacterium).

[0125] In yet some further embodiments, the CRISPR-Cas protein used for the PAM-abolished or reduced Cas protein of the invention is or is derived from CasF-1. In some embodiments, this CasF-1 protein may be the protein sequence as denoted by SEQ ID NO. 358.

[0126] In yet some further embodiments, the CRISPR-Cas protein used for the PAM-abolished or reduced Cas protein of the invention is or is derived from CasF-2. In some embodiments, this CasF-1 protein may be the protein sequence as denoted by SEQ ID NO. 359.

[0127] In yet some further embodiments, the CRISPR-Cas protein used for the PAM-abolished or reduced Cas protein of the invention is or is derived from CasF-3. In some embodiments, this CasF-1 protein may be the protein sequence as denoted by SEQ ID NO. 360.

[0128] In yet some further embodiments, the CRISPR-Cas protein used for the PAM-abolished or reduced Cas protein of the invention is or is derived from an ancestral Cas9. In some embodiments, this ancestral Cas9 protein may be the protein sequence as denoted by SEQ ID NO. 268.

[0129] It should be noted that any CRISPR/Cas proteins may be used by the invention, in some embodiments of the present disclosure, the endonuclease may be a Cas9, CasX, Cas12, Cas13, Cas14, Cas6, Cpf1, CMS1 protein, or any variant thereof that is derived or expressed from Methanococcus maripaludis C7, Corynebacterium diphtheria, Corynebacterium efficiens YS-314, Corynebacterium glutamicum (ATCC 13032), Corynebacterium glutamicum (ATCC 13032), Corynebacterium glutamicum R, Corynebacterium kroppenstedtii (DSM 44385), Mycobacterium abscessus (ATCC 19977), Nocardia farcinica IFM10152, Rhodococcus erythropolis PR4, Rhodococcus jostii RFIA1 , Rhodococcus opacus B4 (uid36573), Acidothermus cellulolyticus 11 B, Arthrobacter chlorophenolicus A6, Kribbella flavida (DSM 17836), Thermomonospora curvata (DSM43183), Bifidobacterium dentium Bd1, Bifidobacterium longum DJ010A, Slackia heliotrinireducens (DSM 20476), Persephonella marina EX H 1, Bacteroides fragilis NCTC 9434, Capnocytophaga ochracea (DSM 7271), Flavobacterium psychrophilum JIP02 86, Akkermansia muciniphila (ATCC BAA 835), Roseiflexus castenholzii (DSM 13941), Roseiflexus RS1, Synechocystis PCC6803, Elusimicrobium minutum Pei191, uncultured Termite group 1 bacterium phylotype Rs D17, Fibrobacter succinogenes S85, Bacillus cereus (ATCC 10987), Listeria innocua, Lactobacillus casei, Lactobacillus rhamnosus GG, Lactobacillus salivarius UCC118, Streptococcus agalactiae-5-A909, Streptococcus agalactiae NEM316, Streptococcus agalactiae 2603, Streptococcus dysgalactiae equisimilis GGS 124, Streptococcus equi zooepidemicus MGCS10565, Streptococcus gallolyticus UCN34 (uid46061), Streptococcus gordonii Challis subst CH1, Streptococcus mutans NN2025 (uid46353), Streptococcus mutans, Streptococcus pyogenes M1 GAS, Streptococcus pyogenes MGAS5005, Streptococcus pyogenes MGAS2096, Streptococcus pyogenes MGAS9429, Streptococcus pyogenes MGAS 10270, Streptococcus pyogenes MGAS6180, Streptococcus pyogenes MGAS315, Streptococcus pyogenes SSI-1, Streptococcus pyogenes MGAS10750, Streptococcus pyogenes NZ131, Streptococcus thermophiles CNRZ1066, Streptococcus thermophiles LMD-9, Streptococcus thermophiles LMG 18311, Clostridium botulinum A3 Loch Maree, Clostridium botulinum B Eklund 17B, Clostridium botulinum Ba4 657, Clostridium botulinum F Langeland, Clostridium cellulolyticum H10, Finegoldia magna (ATCC 29328), Eubacterium rectale (ATCC 33656), Mycoplasma gallisepticum, Mycoplasma mobile 163K, Mycoplasma penetrans, Mycoplasma synoviae 53, Streptobacillus, moniliformis (DSM 12112), Bradyrhizobium BTAil, Nitrobacter hamburgensis X14, Rhodopseudomonas palustris BisB18, Rhodopseudomonas palustris BisB5, Parvibaculum lavamentivorans DS-1, Dinoroseobacter shibae. DFL 12, Gluconacetobacter diazotrophicus Pal 5 FAPERJ, Gluconacetobacter diazotrophicus Pal 5 JGI, Azospirillum B510 (uid46085), Rhodospirillum rubrum (ATCC 11170), Diaphorobacter TPSY (uid29975), Verminephrobacter eiseniae EF01 -2, Neisseria meningitides 053442, Neisseria meningitides alpha14, Neisseria meningitides Z2491 , Desulfovibrio salexigens DSM 2638, Campylobacter jejuni doylei 269 97, Campylobacter jejuni 81116, Campylobacter jejuni, Campylobacter lari RM2100, Helicobacter hepaticus, Wolinella succinogenes, Tolumonas auensis DSM 9187, Pseudoalteromonas atlantica T6c, Shewanella pealeana (ATCC 700345), Legionella pneumophila Paris, Actinobacillus succinogenes 130Z, Pasteurella multocida, Francisella tularensis novicida U 112, Francisella tularensis holarctica, Francisella tularensis FSC 198, Francisella tularensis, Francisella tularensis WY96-3418, or Treponema denticola (ATCC 35405).

[0130] As indicated above, the PAM-binding domain (PBD) of the PAM-reduced or abolished Cas protein of the invention, may be deleted or replaced by at least one other amino acid residue. In some embodiments, the ScCas9 PAM binding domain comprises a loop comprising amino acid residues Thr1330 to Arg1342 of the amino acid sequence as denoted by SEQ ID NO: 258. In more specific embodiments, the PAM-reduced or abolished Cas protein of the invention may comprise the amino acid sequence as denoted by SEQ ID NO. 258, with a deletion or replacement of resides 1330 to 1342 thereof, or any fragment or at least one amino acid residue thereof.

[0131] In some further embodiments, the ScCas9 PAM binding domain comprises a helical bundle comprising amino acid residues Glu1228 to Tyr1343 of the amino acid sequence as denoted by SEQ ID NO: 258. In more specific embodiments, the PAM-reduced or abolished Cas protein of the invention may comprise the amino acid sequence as denoted by SEQ ID NO. 258, with a deletion or replacement of resides 1228 to 1343 thereof, or any fragment or at least one amino acid residue thereof.

[0132] In some further embodiments, the ScCas9 PAM binding domain comprises amino acid residues Glu1108 to Asp1375 of the amino acid sequence as denoted by SEQ ID NO: 258. In more specific embodiments, the PAM-reduced or abolished Cas protein of the invention may comprise the amino acid sequence as denoted by SEQ ID NO. 258, with a deletion or replacement of resides 1108 to 1375 thereof, or any fragment or at least one amino acid residue thereof.

[0133] In yet some further embodiments of the CRISPR-Cas protein of the invention, at least one amino acid residue adjacent to said PBD, may comprise a second loop (Sc loop). In yet some further embodiments, such Sc loop may comprise the amino acid residues Ile367 to Ala376 of ScCas9, as deoted by SEQ ID NO: 291. Specifically, residues Ile367 to Ala376 of ScCas9 that comprises the amino acid sequence as denoted by SEQ ID NO: 258. Thus, in some embodiments, the PAM reduced or abolished Cas protein of the invention may comprise a deletion or replacement of a Second loop (Sc loop) wherein said Sc loop comprises amino acid residues Ile367 to Ala376 of the amino acid sequence as denoted by SEQ ID NO: 258.

[0134] In yet some further embodiments, at least one amino acid residue adjacent to said PBD may be replaced and/or deleted. In some embodiments, such residues may comprise at least one of residue Lys1337 and residue Gln1338.

[0135] Thus, at least one of: residues Thr1330 to Arg1342, residues Glu1228 to Tyr1343, residues Glu1108 to Asp1375, residues Ile367 to Ala376 and residues Lys1337 and Gln1338, of ScCas9, as specified above, may be replaced or deleted.

[0136] In some embodiments, the PAM abolished or reduced ScCas9 of the invention may comprise an amino acid sequence as denoted by SEQ ID NO: 258, with a replacement or deletion of at least one of: residues Thr1330 to Arg1342, residues Glu1228 to Tyr1343, residues Glu1108 to Asp1375, residues Ile367 to Ala376, residue Lys1337 and residue Gln1338.

[0137] In yet some alternative embodiments, where the PAM-reduced or abolished Cas protein of the invention is the SpCas9, such PAM-reduced or abolished Cas has a deletion or replacement of the appropriate PAM binding domain, or parts thereof. In some specific embodiments, such SpCas may comprise the amino acid sequence as denoted by SEQ ID NO: 257. More specifically, in some embodiments, the PBD of such Cas comprises a loop comprising amino acid residues Thr1325 to Arg1335 of the amino acid sequence as denoted by SEQ ID NO: 257. Thus, in some embodiments, such PAM-reduced or abolished Cas may comprise the amino acid sequence as denoted by SEQ ID NO: 257, with a deletion or replacement of residues Thr1325 to Arg1335 thereof. In some embodiments, the PBD of such Cas comprises a helical bundle comprising amino acid residues Glu1219 to Tyr1336 of the amino acid sequence as denoted by SEQ ID NO: 257, thus, in some embodiments, such PAM-reduced or abolished Cas may comprise the amino acid sequence as denoted by SEQ ID NO: 257, with a deletion or replacement of residues Glu1219 to Tyr1336 thereof.

[0138] In some embodiments, the PBD of such Cas comprises amino acid residues Glu1099 to Gln1368 of the amino acid sequence as denoted by SEQ ID NO: 257, thus, in some embodiments, such PAM-reduced or abolished Cas may comprise the amino acid sequence as denoted by SEQ ID NO: 257, with a deletion or replacement of residues Glu1099 to Gln1368 thereof. The PAM abolished or reduced Cas9 protein of the invention comprises deletion and/or replacement of the PBD, or of any fragments thereof, or of any amino acid residues adjacent to the indicated PDB. As specified above, for ScCas9 for example, comprises in some embodiments of the invention, an amino acid sequence as denoted by SEQ ID NO. 258, with a replacement or deletion of at least one of: residues Thr1330 to Arg1342, residues Glu1228 to Tyr1343, residues Glu1108 to Asp1375, residues Ile367 to Ala376, residue Lys1337 and residue Gln1338. It should be understand however, that the present invention further encompasses PBD sequences that should be replaced or deleted in the PAM reduced or abolished Cas9 protein, that may include one, two three, four, five, six, seven, eight, nine, ten or more amino acid residues N′ and/or C′ of the indicated residues, specifically, one, two, three or more residues. For example, in some embodiments, the PAM abolished or reduced Cas9 protein of the invention comprises deletion and/or replacement of residues Thr1330 to Arg1342 of ScCas9. In such case, it should be understood that the invention encompasses PAM reduced or abolished ScCas9 protein with a deletion or replacement of residues 1330+/−one, two, three or more residues to 1342+/−one, two, three or more residues. More specifically, in some non-limiting embodiments, a deletion or replacement may comprise any one of residues 1327, 1328, 1329, 1330, 1331, 1332 or 1333, to any one of residues 1339, 1340, 1341, 1342, 1343, 1344 or 1345. Similarly, the deletion and/or replacement of at least one of residues Glu1228 to Tyr1343, residues Glu1108 to Asp1375, residues Ile367 to Ala376, further encompasses in some embodiments of the invention, replacement and/or deletion of residues Glu1228+/−one, two, three or more residues to Tyr1343+/−one, two, three or more residues, residues Glu1108+/−one, two, three or more residues to Asp1375+/−one, two, three or more residues, and/or residues Ile367+/−one, two, three or more residues to Ala376+/−one, two, three or more residues. It should be understood that such extension of +/−one, two, three or more residues apply for any PBD or any fragment thereof, of any of the Cas proteins disclosed by the invention.

[0139] Still further, as indicated above, in some other embodiments, the PAM abolished or reduced ScCas9 of the invention may comprise different deletions and/or replacements of the Sc loop, and/or Sc loop with one or more point mutations.

[0140] In some further embodiments, the PAM abolished or reduced ScCas9 of the invention may comprise an Sc loop with one or more point mutations. In some embodiments, at least one of the Arg residues of the Sc Loop are substituted. In yet some further embodiments, at least one of the Arg residues 370 and 372 of the PAM abolished or reduced ScCas9 of the invention is substituted. In yet some further embodiments, at least one or more of the Arg residues 370 and 372 of SEQ ID NO. 258 are substituted. In some specific embodiments, the PAM abolished or reduced ScCas9 of the invention may comprise two Gln residues that substitute Arg residues 370 and 372 of SEQ ID NO. 258. Such mutated Sc loop is designated herein as the QQ mutant. In yet some further embodiments, the PAM abolished or reduced ScCas9 of the invention may comprise two Ala residues that substitute Arg residues 370 and 372 of SEQ ID NO. 258. Such mutated Sc loop is designated herein as the AA mutant. In yet another embodiment, the PAM abolished or reduced ScCas9 of the invention may comprise a Sc loop with the loop replaced by corresponding residues from SpCas9 proteins in combination with ancestral mutations. In some embodiments, such PAM abolished or reduced ScCas9 may comprise Sc loop sequences derived from SpCas9, replacing the Sc loop (residues 367 to 376) containing region of ScCas9 that in some embodiments may comprise residues 318 to 497 of SEQ ID NO.258, with residues 318 to 487 of SEQ ID NO.257 (SpCas9). In yet some further embodiments the PAM abolished or reduced ScCas9 of the invention may comprise complete deletion of the Sc Loop in combination with ancestral mutations. In yet some further embodiments, the PAM abolished or reduced ScCas9 of the present disclosure may comprise in addition to the replacement, and/or deletion and/or mutations in the Sc loop described herein, any additional deletion, replacement and/or mutation/s in at least one additional domain, for example, as described herein after.

[0141] It should be understood that the PAM-reduced or abolished Cas protein of the invention comprises deletion or replacement of at least part of the PBD thereof, specifically, deletion or replacement of at least 1%, 2%, 3%, 4%, 5% to about 100%, specifically, about 5% to about 10%, about 10% to about 15%, about 15% to about 20%, about 20% to about 25%, about 25% to about 30%, about 35% to about 40%, about 40% to about 45%, about 45% to about 50%, about 50% to about 55%, about 55% to about 60%, about 65% to about 70%, about 75% to about 80%, about 80% to about 85%, about 85% to about 90%, about 90% to about 95%, about 95% to about 99.9%, more specifically, 98% to about 100%, of the amino acid resides of the PBD thereof and/or any adjacent sequences. Specifically, deletion or replacement of at least 1%, 2%, 3%, 4%, 5%, 6%, 7%, 8%, 9%, 10%, 11%, 12%, 13%, 14%, 15%, 16%, 17%, 18%, 19%, 20%, 21%, 22%, 23%, 24%, 25%, 26%, 27%, 28%, 29%, 30%, 31%, 32%, 33%, 34%, 35%, 36%, 37%, 38%, 39%, 40%, 41%, 42%, 43%, 44%, 45%, 46%, 47%, 48%, 49%, 50%, 51%, 52%, 53%, 54%, 55%, 56%, 57%, 58%, 59%, 60%, 61%, 62%, 63%, 64%, 65%, 66%, 67%, 68%, 69%, 70%, 71%, 72%, 73%, 74%, 75%, 76%, 77%, 78%, 79%, 80%, 81%, 82%, 83%, 84%, 85%, 86%, 87%, 88%, 89%, 90%, 91%, 92%, 93%, 94%, 95%, 96%, 97%, 98%, 99%, 99.9%, 99.99%, 99.999%, 99.9999% or about 100%, of the amino acid resides of the PBD thereof and/or any adjacent sequences.

[0142] In yet some further embodiments, the PAM abolished or reduced CasX of the invention may comprise complete or partial deletion of the PAM binding domain that in some embodiments relates to residues 210-230 and/or residues 513-530 of CasX. In more specific embodiments, CasX comprises the amino acid sequence as denoted by SEQ ID NO. 269. In yet some further embodiments, the PAM abolished or reduced ancestral Cas9 of the invention may comprise complete or partial deletion of the PAM binding domain that in some embodiments relates to residues 1108 to 1375 of ancestral Cas9. In more specific embodiments, ancestral Cas9 comprises the amino acid sequence as denoted by SEQ ID NO. 268.

[0143] In yet some further embodiments, the PAM-reduced or abolished Cas protein of the present disclosure may comprise at least one of a deletion, substitution or replacement of the HNH-nuclease domain of said Cas protein or of any fragments and amino acid residues thereof. In some embodiments, the amino acid sequence of the ScCas9 comprise the amino acid sequence as denoted by SEQ ID NO. 506.

[0144] It yet some further embodiments, the PAM-reduced or abolished CRISPR-Cas protein of the invention may further comprise at least one Non-Specific DNA Binding Domain (NSBD). In yet some further embodiments, the NSBD may be added to said Cas (either to the N′ and/or C′ terminus thereof) and/or may replaces at least one of the PAM binding domain, and/or the PAM recognition motif, and/or the HNH-nuclease domain, and/or at least one adjacent amino acid residue thereof. In some embodiments, the NSBD lacks an RXR motif.

[0145] Non-sequence Specific DNA Binding domains (NSDBs), as used herein are a class of proteins that interact non-specifically with DNA base and backbone elements.

[0146] Thus, in some embodiments, the NSBD may be at least one Double-Stranded DNA binding domain or protein (dsDBP), and any variant and fragments thereof. In certain embodiments, the at least one dsDBP of the CRISPR-Cas protein of the invention, is at least one of: at least one Zinc finger (ZF), TAL effector (TALE), Non-specific RVD from AvrBS3 protein family (e.g., NS residues 12,13. Jens Boch, Science 326, Dec 2009), Helix-turn-helix (HTH), SRC Homology 3 (SH3) domain, chromatin-binding domain (CBD) protein and Sticky-C (StkC), domain or protein, and any variant and fragments thereof.

[0147] More specifically, Zinc fingers are small protein domains that coordinate one or more zinc ions. Different ZFs can bind to and recognize DNA, RNA or proteins. DNA recognition can occur via sequence-specific and non-specific interactions, which are controlled by amino acids in the ZF-DNA interface (Bulyk, Huang, Choo, & Church, 2001, PNAS, 98:7158-63). Fusion of sequence-specific zinc fingers to functional domains like nucleases has been used to engineer sequence-specific nucleases (Tzfira et al., 2012, Plant Biotechnol J, 10:373-89), and sequence specific transcription-activators (Beerli, Dreier, & Barbas, 2000, PNAS, 97:1495-500). It should be noted however that unlike Zinc finger nucleases where ZF confer specificity to a specific DNA sequence, in some embodiments of the invention, the ZF used provide only a non-specific DNA binding activity.

[0148] In some embodiments, the zinc finger applicable by the invention is a 24-residue zinc finger variant which has broad sequence specificity (non-stringent sequence requirement) and enhances non-specific binding to DNA (Chou et al, 2017, PLoS ONE, 12:e0175051). In yet some further specific embodiments, the Cys2His2 finger domains in testis zinc-finger protein may be applicable by the invention. In some particular and non-limiting embodiments, the zinc finger applicable by the invention may comprise the amino acid sequence as denoted by SEQ ID NO. 265, or any fragments, derivatives and variants thereof.

[0149] More specifically, RVDs from AvrBS3 protein family are small protein domains that can bind to and recognize specific DNA sequences. DNA recognition can occur via sequence-specific and non-specific interactions, which are controlled by amino acids in the RVD from AvrBS3 protein family-DNA interface (Moscou et al, 2009, Science, 326:1501).

[0150] In some embodiments, the RVD from AvrBS3 protein family recognizes all base pairs (Boch et al, 2009, Science, 326:1509-12). In some particular and non-limiting embodiments, the Non-specific RVD from AvrBS3 protein family applicable by the invention may comprise the amino acid sequence as denoted by SEQ ID NO. 404, or any fragments, derivatives and variants thereof. In yet some further embodiments, the Helix-turn-helix (HTH) domain may be used as DBP by the invention. More specifically, the helix-turn-helix domain, as used herein, is comprised of two helices that bind to and recognize DNA, separated by a short turn motif. They may be found in proteins involved in DNA transcription regulation and other activities. The helix-turn-helix domain can include two or more helices, as well as beta sheet domains. For example, the “winged helix-turn-helix” domain comprises a 3-helical bundle followed by a 3-stranded beta sheet.

[0151] In yet some further specific embodiments, the HTH applicable in the present disclosure may comprise Lac repressor (Lad) residues 1 to 46, known to fold independently, bind non-specifically, and facilitate diffusion along DNA (Kalodimos et al, 2004, Science 305:386-9). In some particular and non-limiting embodiments, Lac repressor residues 1 to 46, may comprise the amino acid sequence as denoted by SEQ ID NO. 259, or any fragments, derivatives and variants thereof.

[0152] Still further, in some further embodiments, at least one SH3 domain may be used as DBP by the invention. More specifically, the five-stranded beta-barrel is a protein motif composed of five beta-strands (also known as a “SRC homology 3 domain” or SH3 domain). In the HIV integrase, a five-stranded beta-barrel mediates non-specific binding to DNA. One beta-barrel motif described here comprises residues 219 to 270 of the HIV integrase protein (Eijkelenboom et al, 1999, Proteins 36:556-64). In some particular and non-limiting embodiments, HIV integrase residues 219 to 270, may comprise the amino acid sequence as denoted by SEQ ID NO. 260, or any fragments, derivatives and variants thereof.

[0153] In yet some further embodiments, a SRC Homology 3 (SH3) SH3 domain-like protein applicable in the present invention may comprise the Sso7D DBP from Sulfolobus solfataricus. More specifically, residues 1 to 64, of the Sso7D DBP, which also has been found to mediate non-specific DNA binding interactions (Kalichuk et al, 2016, Scientific Reports 6:37274), may be used as DBP in accordance with the invention. In some particular embodiments, residues 1 to 64 of Sso7D DNA-binding protein may comprise the amino acid sequence as denoted by SEQ ID NO. 261, or any fragments, derivatives and variants thereof.

[0154] In certain embodiments, the Sto7D DBP from Sulfolobus tokodaii, may be used as DBP by the present invention. In more specific embodiments, residues 1 to 64 of the Sto7D DBP, may be used, more specifically, residues 1 to 64 that comprise the amino acid sequence as denoted by SEQ ID NO. 262, or any fragments, derivatives and variants thereof.

[0155] Still further, in some embodiments, CBDs (chromatin-binding domains), may be used by the invention as DBPs. More specifically, Chromatin is a structure formed by the assembly of DNA and proteins. Chromatin-binding proteins interact with DNA in the context of chromatin and may be involved in forming and regulating the condensed structure, which can govern DNA accessibility to transcription, replication, and other functions. Non-limiting examples for CBDs applicable in the present disclosure include HMGs and StkCs.

[0156] In some further specific embodiments, HMGs (high mobility group proteins) may be used as DBPs by the present invention. High mobility group proteins are chromosomal proteins involved in DNA replication, recombination, repair, and transcription. These proteins can bind to and alter chromatin structure, and comprise three families HMGA, HMGB, and HMGN (Reeves, 2010, Biochim Biophys Acta, 1799(1-2):3). For example, the HMGB family are alpha helical protein domains, which can bind to the minor groove of DNA in a non-sequence specific manner, and can bend DNA. Transient interactions of HMGB with DNA may mediate stable interactions of transcription factors with their DNA targets (Agresti & Bianchi, 2003, Curr Opin Genet Dev, 13:170-8).

[0157] In some specific embodiments, the HMGB protein used herein may comprise residues 2 to 79 of human HMGB4. In further particular embodiments, such domain may comprise the amino acid sequence as denoted by SEQ ID NO. 264, or any fragments, derivatives and variants thereof.

[0158] In some specific embodiments, the HMGN protein used herein may comprise residues 1 to 100 of human HMGN. In further particular embodiments, such domain may comprise the amino acid sequence as denoted by SEQ ID NO. 482, or any fragments, derivatives and variants thereof.

[0159] In some specific embodiments, the HMGN protein used herein may comprise residues 1 to 100 of human HMGB1. In further particular embodiments, such domain may comprise the amino acid sequence as denoted by SEQ ID NO. 483, or any fragments, derivatives and variants thereof.

[0160] In some specific embodiments, the HMGN protein used herein may comprise residues 1 to 100 of human HMGB3. In further particular embodiments, such domain may comprise the amino acid sequence as denoted by SEQ ID NO. 484, or any fragments, derivatives and variants thereof. HMG proteins have been used to improve Cas9/Cpfl activity in human cells (US patent application 201762531222). While in Cas9/Cpfl the use of HMG domain is for chromatin unfolding and remodeling, in some embodiments of the present invention, HMG domains are used to bind DNA non-specifically as a replacement for PAM-BD.

[0161] Still further, in some embodiments, Sticky-C (StkC) may be used as DBPs by the present invention. More specifically, the C-terminal chromatin binding domain of Arabidopsis MBD7 methyl-CpG-binding domain, which allows MBD7 to bind to DNA independently of methylation state (Zemach et al., 2009, Exp Cell Res, 315:3554-62). When fused to other proteins, StkC can improve chromatin binding affinity, without compromising their ability to bind native target sites. In some particular embodiments, the StkC domain used by the present invention is residues 232-305 from MBD7. More specifically, in some embodiments, such domain comprises amino acid sequence as denoted by SEQ ID NO. 263.

[0162] Thus, in more specific embodiments, the invention provides at least one PAM-abolished or reduced Cas protein that comprises the following NBDSs that replace at least part of the PBDs thereof, specifically, the ZF domain or protein used for the CRISPR-Cas protein of the invention is at least one Cys₂His₂ zinc-finger domains (TZD) of testis zinc-finger protein, in yet some further embodiments, the HTH domain or protein comprise Lac repressor residues 1 to 46, still further, in some embodiments, the SH3 domain may comprise at least one of: residues 219 to 270 of the human immune deficiency virus (HIV) integrase protein, residues 1 to 64 of the Sso7D DNA-binding protein of Sulfolobus solfataricus and residues 1 to 64 of the Sto7D DNA-binding protein from Sulfolobus tokodaii. In certain embodiments, the StkC domain used for the CRISPR-Cas protein of the invention comprise residues 232-305 of Arabidopsis MBD7 methyl-CpG-binding domain. In yet some further embodiment, the CBD used for the CRISPR-Cas protein of the invention comprises at least one High Mobility Group (HMG) protein, in more specific embodiments, such HMG protein may be any one of HMGA, HMGB and HMGN. In yet some alternative embodiments, the PAM binding domain and/or at least one adjacent amino acid residue of the CRISPR-Cas protein of the invention may be replaced by at least one NSBD, that may be at least one single-strand binding proteins or domains (SSB).

[0163] Single-stranded DNA binding proteins (SSBs) are a class of proteins that bind ssDNA in a non-sequence specific fashion and stabilize and protect single strand DNAs in vivo.

[0164] In some embodiments, human SSB1 domain 1, may be used by the present invention. In yet some further embodiments, the SSB used in the invention may comprise SEQ ID NO 405, or any fragments, derivatives and variants thereof.

[0165] In some embodiments, the CRISPR-Cas protein of the invention may be a Cas mutant or variant. It should be understood that such mutation or variation is according to some embodiments of the invention, in addition to the deletion of the PBD of the Cas protein or replacement thereof with at least one NSBD as discussed above. “Mutant” or “variant” as used herein, refers to a Cas protein encoded by a sequence comprising at least one mutation, or in which at least a portion of the functionality of the sequence has been lost, or changed. As used herein, the term “mutation,” refers to any change in a nucleic acid sequence that may arise from at least one of, a deletion, addition, substitution, or rearrangement of at least one nucleotide in the mutated sequence. The mutation may also affect one or more properties of the proteins and/or steps that the sequence is involved in. For example, a change in a DNA sequence may lead to the synthesis of an altered mRNA and/or a protein that is active, partially active, inactive, or displaying at least one altered property, specifically, stability, bioavailability, solubility, size and the like.

[0166] Thus, in some specific embodiments, such mutant or variant may be a Cas protein having altered activity, stability, specificity, solubility, bioavailability, size or any other altered functional and/or structural property. In some embodiments, such Cas protein may be a Cas protein having reduced or abolished nucleolytic activity. In yet some further embodiments, such Cas protein may have a reduced size. In certain embodiments, the Cas mutant or variant of the invention may comprise at least one of: (a) at least one point mutation substituting aspartic acid residue at position 10 to alanine (D10A) and/or at least one point mutation substituting histidine residue 849 to alanine (H849A). This Cas mutant is devoid of nucleolytic activity and is also referred to herein as a dead Cas, or “dCas”. It should be however noted that any other additional or alternative mutation or substitution that results in a dead Cas is encompassed by the present disclosure. Still further, in some embodiments, the Cas of the present disclosure may comprise at least one of; (b) at least one deletion, substitution and/or replacement of at least one of: (i) the HNH-nuclease domain or any fragment thereof, and/or at least one amino acid residue thereof; (ii) the REC1/2 domain or any fragments thereof and/or at least one amino acid residue thereof; (iii) the FLEX domain, or any fragments thereof and/or at least one amino acid residue thereof; (iv) the RUVC domain or any fragments thereof and/or at least one amino acid residue thereof, and (v) any combinations of (i), (ii), (iii), and (iv); and (c) at least one mutation in at least one residue of at least one of (i) the HNH-nuclease domain or any fragment thereof; (ii) the REC1/2 domain or any fragments thereof; (iii) the FLEX domain, or any fragments thereof; (iv) the RUVC domain or any fragments thereof; and (v) and any combinations of (i), (ii), (iii), and (iv). Still further, in some embodiments, the PAM-reduced or abolished Cas protein of the invention may comprise a deletion in at least one of (i), (ii), (iii), and (iv) or any combinations thereof and additionally, at least one mutation in at least one amino acid residue comprised within the PBD of the ScCas9. Non-limiting embodiments for such mutations may comprise the QQ mutant that may comprise two Gln residues that substitute Arg residues 370 and 372 of the ScCas9 as denoted by SEQ ID NO. 258. In yet some further embodiments, the PAM abolished or reduced ScCas9 of the invention may comprise the AA mutant, that comprise two Ala residues that substitute Arg residues 370 and 372 of SEQ ID NO. 258. As shown by Examples 2 and 3, the PAM abolished or reduced ScCas9 of the present disclosure may comprise Sc loop QQ or AA mutations, or alternatively, Sc loop depletion or replacement thereof with at least one dsDBP or SSB as discussed above, combined with deletion of HNH, and replacement of the RuvC and Recl and Rec2 domains with ancestral versions.

[0167] More specifically, in some embodiments, the PAM-reduced or abolished Cas protein of the invention may be a defective Cas mutant that lacks any nucleolytic activity. More specifically, as discussed previously, Cas9 generates double strand breaks (DSBs) through the combined activity of two nuclease domains, RuvC and HNH. The exact amino acid residues within each nuclease domain that are critical for endonuclease activity are D10A for HNH and H840A for RuvC (in S. pyogenes Cas9) and DlOA for HNH and H849A for RuvC (in S. canis Cas9). It should be therefore noted that the invention further encompasses modified versions of the Cas9 enzyme containing only one active catalytic domain (called “Cas9 nickase”). Cas9 nickases still bind DNA based on gRNA specificity, but nickases are only capable of cutting one of the DNA strands, resulting in a “nick”, or single strand break, instead of a DSB.

[0168] In some embodiments, the PAM-reduced or abolished Cas protein of the invention may further comprise at least one substitution in residues corresponding to of D10A and H849A of ScCas9. Still further, as illustrated in Example 3, in an attempt to reduce the size of the PAM-reduced or abolished Cas protein of the invention, several variants having deletions of certain domain of Cas or fragments thereof, were generated. Thus, in some embodiments, the PAM-reduced or abolished Cas protein of the invention may further comprise a deletion of the HNH-nuclease domain or any fragment thereof of residues corresponding to, specifically, of residues 793-914 of ScCas9 (the HNH domain is denoted by SEQ ID NO. 506). In yet some further embodiments, the PAM-reduced or abolished Cas protein of the invention may further comprise a deletion of the REC2 domain or any fragments thereof corresponding to, specifically, of residues 180-308 of ScCas9. In some further embodiments, the PAM-reduced or abolished Cas protein of the invention may further comprise a deletion of the FLEX domain or any fragments thereof corresponding to, specifically, of residues 1012-1079 of ScCas. Still further, in some embodiments, the PAM-reduced or abolished Cas protein of the invention may further comprise a deletion of the RUVC domain or any fragments thereof of residues corresponding to, specifically, of residues 1-60, 728-784, and 918-1108 of ScCas. It should be understood that the different residues of the various domains that may be deleted or replaced in the PAM reduced or abolished Cas protein of the invention, specifically, at least one of HNH-nuclease domain, REC2 domain, RUVC domain, FLEX domain, as specified herein refer to ScCas9, specifically, the ScCas9 that comprises the amino acid sequence as denoted by SEQ ID NO. 258. However, the invention encompasses the use of any Cas protein, and specifically, any of the Cas proteins disclosed by the invention, and therefore, the corresponding HNH-nuclease domain, REC2 domain, RUVC domain, FLEX domain, that comprise amino acid sequences that correspond to those specified for ScCas herein above, may be deleted and/or replaced by in each of the PAM reduced or abolished Cas protein of the invention. It should be understood that in certain embodiments, the PAM-reduced or abolished Cas protein of the invention may comprise in addition to the deletion and/or replacement of at least part of the PBD thereof, any additional mutation, deletion or insertion, specifically, as discussed above, provided that such PAM-reduced or abolished Cas protein of the invention still retains, at least in part, the ability of binding and being guided by at least one target recognition element.

[0169] Thus, according to some embodiments, the CRISPR-Cas protein of the invention or any variant, mutant, fusion/chimeric protein, complex or conjugate thereof, is capable of binding at least one target recognition element. As used herein a “target recognition element” is a nucleic acid sequence (either RNA or DNA or a modified nucleic acid or a combination thereof) that directs the PAM abolished or reduced Cas protein of the invention or any chimera/fusion, conjugate or complex thereof to the desired target site in a target nucleic acid sequence. Thus, the target recognition element targets the nucleic acid-modifier or effector component attached/fused, complexed or conjugated to the PAM-reduced or abolished Cas protein of the invention (forming the chimeric protein, conjugate or complex of the invention) to the target site. In more specific embodiments, such at least one target recognition element may be or may comprise at least one of a single strand ribonucleic acid (RNA) molecule, a double strand RNA molecule, a single-strand DNA molecule (ssDNA), a double strand DNA (dsDNA), a modified deoxy ribonucleotide (DNA) molecule, a modified RNA molecule, a locked-nucleic acid molecule (LNA), a peptide-nucleic acid molecule (PNA) and any hybrids, for example, DNA:RNA hybrid stem-loop, or combinations thereof.

[0170] In yet a further aspect, the invention provides a nucleic acid guided genome modifier or effector chimeric or fusion protein, or any modifier/effector chimera or conjugate thereof. More specifically, nucleic acid guided genome modifier/effector chimeric or fusion protein, or conjugate or complex of the invention comprises at least two essential elements:

[0171] The first component (a), is at least one Cas protein, or any Cas protein derived domain, having reduced or abolished PAM constraint or any fragment, variant, or mutant thereof. It should be noted that in some optional embodiments, at least one of: the PBD and/or the PAM recognition motif, and/or the HNH-nuclease domain of the Cas protein, any fragment of the PBD, and/or of the PAM recognition motif, and/or of the HNH-nuclease domain, and at least one amino acid residue adjacent to the PBD, and/or to the PAM recognition motif, and/or to the HNH-nuclease domain, is deleted, substituted, mutated or replaced.

[0172] The second component (b), is at least one nucleic acid modifier or effector component. As indicated above, these two components (a) and (b), are provided by the invention as a fusion or chimeric protein or alternatively, as a conjugate or complex, that display a nucleic acid guided effector/modifier function on a target nucleic acid sequence of interest.

[0173] As will be further elaborated herein after, the nucleic acid guided genome modifier or effector chimeric protein, complex or conjugate of the invention is capable of modifying (either physically, and/or functionally), a target nucleic acid sequence, for example, a target sequence in at least one of a chromosomal, mitochondrial DNA, or DNA of any cellular organelle, for example, chloroplast, amyloplast and chromoplast, or any other extra-chromosomal nucleic acid molecule (e.g., any genetic element such as plasmids and viral nucleic acid sequences). It should be further noted that the nucleic acid guided genome modifier or effector chimeric protein of the invention is capable of binding, or being guided or directed to the specific target sequence by a nucleic acid target recognition element that provides the specificity and binding capabilities of the modifier chimera of the invention to the target nucleic acid through base-pairing of the target recognition element and a target nucleic acid. In some embodiments, the modification on the target sequence may include, but is not limited to: mutation, deletion, insertion, replacement, binding, digestion, nicking, methylation, acetylation, ligation, recombination, helix unwinding, chemical modification, labeling, activation, and inactivation or any combinations thereof, as well as any editing activity (e.g., mutation, substitution, replacement, deletion or insertion of at least a part of the target sequence). Still further, the target nucleic acid functional modification may lead to, but is not limited to: changes in transcriptional activation, transcriptional inactivation, alternative splicing, chromatin rearrangement, pathogen inactivation, virus inactivation, change in cellular localization, compartmentalization of nucleic acid, changes in stability, and the like, or combinations thereof.

[0174] In some embodiments, the Cas protein used for the nucleic acid guided genome modifier or effector chimeric protein, complex or conjugate of the invention is at least one of Cas9, CasX, Cas12al, Cas14a1, CasF-1, CasF-2, CasF-3, an ancestral Cas and Cas14b5.

[0175] In more specific embodiments, the Cas protein used for the nucleic acid guided genome modifier or effector chimeric protein of the invention may be at least one of ScCas9, SpCas9, CasF-1, CasF-2, CasF-3, ancestral Cas9, Cas12a, Cas14a1, Cas14b5, and deltaproteobacteria CasX. In yet some further specific embodiments, at least one PAM interacting Arginine and/or lysine residue of the PBD of such Cas protein is deleted, substituted or replaced.

[0176] Still further, in some alternative embodiments, the Cas used as a component of the nucleic acid guided genome modifier or effector chimeric protein, complex or conjugate of the invention may be ScCas9. In more specific embodiments, the ScCas9 may comprise an amino acid sequence as denoted by SEQ ID NO. 258, with a replacement or deletion of at least one of: residues Thr1330 to Arg1342, residues Glu1228 to Tyr1343, residues Glu1108 to Asp1375, residues Ile367 to Ala376, at least one of residue Lys1337 and residue Gln1338. As indicated herein before in connection with other aspects of the invention, the particular residues defining the PBD of the Cas protein of the invention, specifically, the ScCas, may start at least one, two, three or more residues N′ or C′ to the specified starting residue, and/or end at least one, two, three or more residues C′ or N′ to the specified end residue. For example, in case of residues Thr1330 to Arg1342, the deleted or replaced sequence may comprise a sequence stating at any one of residues 1327, 1328, 1329, 1330, 1331, 1332 or 1333 of ScCas, and ends at any one of residues 1339, 1340, 1341, 1342, 1343, 1344 or 1345.

[0177] In yet some further embodiments, the PAM-reduced or abolished CRISPR-Cas protein of the invention may further comprise at least one Non-Specific DNA Binding Domain (NSBD). In yet some further embodiments, the NSBD may be added to said Cas (either to the N′ and/or C′ terminus thereof) and/or may replace at least one of the PAM binding domain, and/or the PAM recognition motif, and/or the HNH-nuclease domain, and/or at least one adjacent amino acid residue thereof. In more specific embodiments, such NSBD may be at least one dsDBP, and any variant and fragments thereof.

[0178] In some particular embodiments, the at least one dsDBP used to replace the PAM binding domain of the Cas protein used by the nucleic acid guided genome modifier or effector chimeric protein of the invention, may be at least one of: at least one ZF, HTH, SH3 domain, Non-specific RVD from AvrBS3 protein family, a CBD protein and StkC, domain or protein, and any variant and fragments thereof.

[0179] In certain embodiments, the ZF domain or protein may be at least one Cys₂His₂ TZD. In some further embodiments, the HTH domain or protein comprise Lac repressor (also referred to herein as Lad) residues 1 to 46. In some embodiments, the SH3 domain comprise at least one of: residues 219 to 270 of HIV integrase, protein residues 1 to 64 of the Sso7D DNA-binding protein of Sulfolobus solfataricus, and residues 1 to 64 of the Sto7D DNA-binding protein from Sulfolobus tokodaii. In certain embodiments, the StkC domain comprises residues 232-305 of Arabidopsis MBD7 methyl-CpG-binding domain. Still further, in some embodiments, the CBD comprises at least one High Mobility Group (HMG) protein. More specifically, such HMG protein may be any one of HMGA, HMGB and HMGN.

[0180] In more specific embodiments, the Cys₂His₂ of Testis zinc finger 3 (TZD) used herein may comprise the amino acid sequence as denoted by SEQ ID NO. 265. In yet some further embodiments, the Lac repressor residues 1 to 46, that may be applicable in the present invention, may comprise the amino acid sequence as denoted by SEQ ID NO. 259. In certain embodiments, the SH3 domain comprising at least one of: residues 219 to 270 of HIV integrase protein, that may be applicable in the present invention, may comprise the amino acid sequence as denoted by SEQ ID NO. 260. Still further, in some embodiments, residues 1 to 64 of the Sso7D DNA-binding protein of Sulfolobus solfataricus, that may be applicable in the present invention, may comprise the amino acid sequence as denoted by SEQ ID NO. 261. In some embodiments, residues 1 to 64 of the Sto7D DNA-binding protein from Sulfolobus tokodaii, that may be applicable in the present invention, may comprise the amino acid sequence as denoted by SEQ ID NO. 262. In some further embodiments, StkC domain that comprise residues 232-305 of Arabidopsis MBD7 methyl-CpG-binding domain and may be applicable in the present invention, may comprise the amino acid sequence as denoted by SEQ ID NO. 263. In yet some further embodiments, CBD that comprises at least one High Mobility Group (HMG) protein, and may be applicable in the present invention, may comprise the amino acid sequence as denoted by SEQ ID NO. 264.

[0181] In some alternative or additional embodiments, at least one SSB may be used to replace the PAM binding domain of the Cas protein of the nucleic acid guided genome modifier or effector chimeric protein of the present disclosure. In some specific embodiments, the SSB used may comprise the amino acid sequence as denoted by SEQ ID NO. 405.

[0182] In certain embodiments, the Cas protein used as one of the components of the nucleic acid guided genome modifier or effector chimeric protein of the invention may be a Cas mutant or variant. In some specific embodiments, such mutant or variant may be a Cas protein having altered activity, stability, specificity, solubility, size or any other altered functional and/or structural property. In some embodiments, such Cas protein may be a Cas protein having reduced or abolished nucleolytic activity. In yet some further embodiments, such Cas protein may have a reduced size. In more specific embodiments, such mutant or variant further comprises in addition to deletion, substitution, mutation or replacement of the PBD or parts thereof, at least one of: (a) at least one point mutation substituting aspartic acid residue at position 10 to alanine (D10A) and/or at least one point mutation substituting histidine residue 849 to alanine (H849A). Still further, the Cas may further or alternatively comprise at least one of (b) at least one deletion and/or substitution, and/or mutation and/or replacement of at least one of: (i) the HNH-nuclease domain or any fragment thereof and/or at least one amino acid residue thereof; (ii) the REC2 domain or any fragments thereof and/or at least one amino acid residue thereof; (iii) the FLEX domain or any fragments thereof and/or at least one amino acid residue thereof; (iv) the RUVC domain or any fragments thereof and/or at least one amino acid residue thereof. And (v), any combinations of (i), (ii), (iii), and (iv); and (c) at least one mutation in at least one residue of at least one of (i) the HNH-nuclease domain or any fragment thereof; (ii) the REC2 domain or any fragments thereof; (iii) the FLEX domain, or any fragments thereof; (iv) the RUVC domain or any fragments thereof; and (v) any combinations of (i), (ii), (iii), and (iv). Still further, in some embodiments, the PAM-reduced or abolished Cas protein of the invention may comprise a deletion in at least one of (i), (ii), (iii), and (iv) or any combinations thereof and additionally, at least one mutation in at least one amino acid residue comprised within the PBD of the ScCas9. Non-limiting embodiments for such mutations may comprise the QQ mutant that may comprise two Gln residues that substitute Arg residues 370 and 372 of the ScCas9 as denoted by SEQ ID NO. 258. In yet some further embodiments, the PAM abolished or reduced ScCas9 of the invention may comprise the AA mutant, that comprise two Ala residues that substitute Arg residues 370 and 372 of SEQ ID NO. 258. As shown by Examples 2 and 3, the PAM abolished or reduced ScCas9 of the present disclosure may comprise Sc loop QQ or AA mutations, or alternatively, Sc loop depletion or replacement thereof with at least one dsDBP or SSB as discussed above, combined with deletion of HNH, and replacement of the RuvC and Recl and Rec2 domains with ancestral versions.

[0183] As indicated above, in more specific embodiments, the PAM-reduced or abolished Cas protein used as one of the components of the nucleic acid guided genome modifier or effector chimeric protein of the invention, may be a defective CRISPR-Cas protein, specifically, dCas protein that is a Cas protein devoid of a nucleolytic activity. Such mutant, in addition to the deletion or replacement of the PBD or any parts thereof, also carries at least one mutation that abolishes, or at least reduces its nucleolytic activity.

[0184] Thus, in some alternative embodiments, PAM-reduced or abolished Cas protein of the invention or any chimera or conjugate thereof, may be a defective nuclease, or defective enzyme. A defective enzyme (e.g., a defective mutant, variant or fragment) may relate to an enzyme that displays an activity reduced in about 1%, 2%, 3%, 4%, 5% to about 100%, specifically, about 5% to about 10%, about 10% to about 15%, about 15% to about 20%, about 20% to about 25%, about 25% to about 30%, about 35% to about 40%, about 40% to about 45%, about 45% to about 50%, about 50% to about 55%, about 55% to about 60%, about 65% to about 70%, about 75% to about 80%, about 80% to about 85%, about 85% to about 90%, about 90% to about 95%, about 95% to about 99.9%, more specifically, reduced activity of about 98% to about 100%, as compared to the wild type active nuclease. More specifically, an enzyme that displays an activity reduced in about 1%, 2%, 3%, 4%, 5%, 6%, 7%, 8%, 9%, 10%, 11%, 12%, 13%, 14%, 15%, 16%, 17%, 18%, 19%, 20%, 21%, 22%, 23%, 24%, 25%, 26%, 27%, 28%, 29%, 30%, 31%, 32%, 33%, 34%, 35%, 36%, 37%, 38%, 39%, 40%, 41%, 42%, 43%, 44%, 45%, 46%, 47%, 48%, 49%, 50%, 51%, 52%, 53%, 54%, 55%, 56%, 57%, 58%, 59%, 60%, 61%, 62%, 63%, 64%, 65%, 66%, 67%, 68%, 69%, 70%, 71%, 72%, 73%, 74%, 75%, 76%, 77%, 78%, 79%, 80%, 81%, 82%, 83%, 84%, 85%, 86%, 87%, 88%, 89%, 90%, 91%, 92%, 93%, 94%, 95%, 96%, 97%, 98%, 99% , 99.9%, 99.99%, 99.999%, 99.9999% or about 100%, as compared to the wild type active nuclease.

[0185] In some specific and non-limiting embodiments, the PAM-reduced or abolished Cas protein used for the effector/modifier chimera or conjugate of the invention, may be a defective Cas that carries at least one substitution, specifically, at least one of D10A and H849A.

[0186] In yet some further embodiments, the PAM-reduced or abolished Cas protein used for the effector/modifier chimera or conjugate of the invention, may be a Cas protein that has a deletion in the HNH-nuclease domain or in any fragment thereof. In some further embodiments, the PAM-reduced or abolished Cas protein used for the effector/modifier chimera or conjugate of the invention, may be a Cas protein that has a deletion in the REC2 domain or in any fragments thereof. In some further embodiments, the PAM-reduced or abolished Cas protein used for the effector/modifier chimera or conjugate of the invention, may be a Cas protein that has a deletion in the FLEX domain (for example, as denoted by SEQ ID NO. 292), or in any fragments thereof. In some further embodiments, the PAM-reduced or abolished Cas protein used for the effector/modifier chimera or conjugate of the invention, may be a Cas protein that has a deletion in the RUVC domain or in any fragments thereof.

[0187] In certain embodiments, the Cas protein used as one of the main components in the nucleic acid guided genome modifier or effector chimeric protein of the invention, is capable of binding at least one target recognition element. It should be understood that the nucleic acid guided genome modifier/effector chimeric protein, complex or conjugate of the invention is capable of binding or being associated with the target recognition element, for example, by any one of, affinity of non-covalent bonds such electrostatic interactions (salt bridges), dipolar interactions (hydrogen bonding, H-bonds), entropic effects (hydrophobic interactions) and dispersion forces (base stacking). As indicated above, the genome modifier/effector chimeric protein, complex or conjugate of the invention is a nucleic acid guided effector, that is capable of binding to at least one target recognition element that guides or directs the effector to the specific target nucleic acid sequence.

[0188] In more specific embodiments, such at least one target recognition element is at least one of a single strand ribonucleic acid (RNA) molecule, a double strand RNA molecule, a single-strand DNA molecule (ssDNA), a double strand DNA (dsDNA), a modified deoxy ribonucleotide (DNA) molecule, a modified RNA molecule, a locked-nucleic acid molecule (LNA), a peptide-nucleic acid molecule (PNA) and any hybrids, for example, DNA:RNA hybrid stem-loop, or combinations thereof. In some further specific embodiments, the target recognition element of the invention is a guide RNA (gRNA), such gRNA in accordance with some embodiments may include split-gRNA (i.e. separate or annealed tracer and target-specific RNAs) and single-gRNA form.

[0189] The invention provides a nucleic acid guided genome effector/modifier chimeric/fusion protein, complex or conjugate that comprise the PAM abolished or reduced Cas protein of the invention and at least one nucleic acid modifier component. As indicated above, the second component of the nucleic acid guided genome modifier chimeric protein of the invention is a nucleic acid modifier or effector component. In some embodiments, such effector or modifier component may be a protein-based modifier, a nucleic acid-based modifier or any combinations thereof. In some embodiments, “the nucleic acid modifier or effector” component may be any component, element or specifically protein, polypeptide or nucleic acid sequence or oligonucleotide that upon direct or indirect interaction with a target nucleic acid sequence, modify or modulate the structure, function (e.g., expression), or stability thereof. Such modification may include the modification of at least one functional group, addition or deletion of at least one chemical group by modifying an existing functional group or introducing a new one such as methyl group. The modifications may include cleavage, methylation, demethylation, deamination and the like. Specific modifier component applicable in the present invention may include but are not limited to a protein-based modifier, for example, a nuclease, a methyltransferase, a methylated DNA binding factor, a transcription factor, transcription repressor, a chromatin remodeling factor, a polymerase, a demethylase, an acetylase, a deacetylase, a kinase, a phosphatase, an integrase, a recombinase, a ligase, a topoisomerase, a gyrase, a helicase, any combinations thereof or any fusion proteins comprising at least one of the modifier proteins disclosed by the invention.

[0190] As will be elaborated herein below, “activity” of the nucleic acids modifier or effector component in the nucleic acid guided genome modifier/effector chimeric protein, complex or conjugate of the invention, referred to herein may relate in some embodiments to any modification performed in any nucleic acid molecule or sequence, for example, any sequence encoding a product, or alternatively any non-coding sequences. Such modification in some embodiments may result (specifically in case performed on a coding sequence, or alternatively in a regulatory non-coding sequence), in modulation of the expression, stability or activity of the encoded product. Non-limiting examples for such modification may be nucleolytic distraction, methylation, demethylation, acetylation and the like. In some specific embodiments, such nucleic acid modifier protein may be a nuclease, and the activity referred to herein may be the nucleolytic activity of the nuclease. However, in some alternative embodiments, the invention further encompasses other activities that do not relate to nucleolytic activity.

[0191] “Modulation” as used herein means a perturbation of function and/or activity, stability and/or structure. In certain embodiments, modulation means an increase in gene expression. In certain embodiments, modulation means a decrease in gene expression. In yet some further embodiments, modulation may further include editing functions (specifically, deletion, insertion, mutations, substitutions or replacement) performed by the modifier or effector of the invention on a target nucleic acid sequence.

[0192] Thus, target nucleic acid modification performed by the modifier or effector component of the nucleic acid guided genome modifier/effector chimeric protein, complex or conjugate of the invention may include, but is not limited to: mutation, deletion, insertion, replacement, binding, digestion, nicking, methylation, acetylation, ligation, recombination, helix unwinding, chemical modification, labeling, activation, and inactivation or any combinations thereof. Target nucleic acid functional modification may lead to, but is not limited to: changes in transcriptional activation, transcriptional inactivation, alternative splicing, chromatin rearrangement, pathogen inactivation, virus inactivation, change in cellular localization, compartmentalization of nucleic acid, changes in stability, and the like, any editing activity (e.g., mutation, substitution, replacement, deletion or insertion of at least a part of the target sequence), or combinations thereof.

[0193] In yet some particular and non-limiting embodiments, the effector/modifier component of the nucleic acid guided genome modifier/effector chimeric protein, complex or conjugate of the invention may be any of the proteins indicated above, with the proviso that such effector is not a recombinase.

[0194] In some specific embodiments, the nucleic acid modifier or effector component of the nucleic acid guided genome modifier or effector chimeric protein of the invention, may be at least one nuclease. More specifically, as used herein, the term “nuclease” refers to an enzyme that in some embodiments display a nucleolytic activity, specifically, capable of cleaving the phosphodiester bonds between monomers of nucleic acids (e.g., DNA and/or RNA). Nucleases variously effect single and double stranded breaks in their target molecules. There are two primary classifications based on the locus of activity. Exonucleases digest nucleic acids from the ends. Endonucleases act on regions in the middle of target molecules. They are further subcategorized as deoxyribonucleases and ribonucleases. The former acts on DNA, the latter on RNA. The nucleases belong just like phosphodiesterase, lipase and phosphatase to the esterases, a subgroup of the hydrolases. This subgroup includes the Exonucleases which are enzymes that work by cleaving nucleotides one at a time from the end (exo) of a polynucleotide chain. A hydrolyzing reaction that breaks phosphodiester bonds at either the 3′ or the 5′ end occurs. Eukaryotes and prokaryotes have three types of exonucleases involved in the normal turnover of mRNA: 5′ to 3′ exonuclease (Xrn1), which is a dependent decapping protein; 3′ to 5′ exonuclease, an independent protein; and poly (A)-specific 3′ to 5′ exonuclease. Members of this family include Exodeoxyribonucleases producing 5′-phosphomonoes ters, Exoribonucleases producing 5′-phosphomonoesters, Exoribonucleases producing 3′-phosphomonoesters and Exonucleases active with either ribo-or deoxy-. Members of this family include exonuclease, II, III, IV, V, VI, VII, and VIII. As noted above, Endonucleases are enzymes that cleave the phosphodiester bond within a polynucleotide chain. Some endonucleases, such as deoxyribonuclease I, cut DNA relatively nonspecifically (without regard to sequence), while many, typically called restriction endonucleases or restriction enzymes, cleave only at very specific nucleotide sequences.

[0195] In some embodiment, the nuclease may be an active enzyme having a nucleolytic activity as specified above.

[0196] In more specific embodiments, such nuclease may be a Type IIS restriction endonuclease or any fragment, variant, mutant, fusion protein or conjugate thereof.

[0197] A restriction enzyme is an embodiment for endonuclease that cleaves DNA into fragments at or near its specific recognition sites within the molecule. To cut DNA, most restriction enzymes make two incisions, through each sugar-phosphate backbone (i.e. each strand) of the DNA double helix. In some embodiments, Type IIS restriction enzymes recognize asymmetric DNA sequences and cleave outside of their recognition sequence, which can be removed, and can thus be used. Non-limiting examples of such restriction enzymes may include, but are not limited to FokI, AcuI, AlwI, BaeI, BbsI, BbvI, BccI, BceAI, BcgI, BciVI, BcoDI, BfuAI, BmrI, BpmI, BpuEI, BsaI, BsaXI, BseRI, BsgI, BsmAI, BsmBI, BsmFI, BsmI, BspCNI, BspMI, BspQI, BsrDI, BsrI, BtgZI, BtsCI, BtsI, BtsIMutI, CspCI, EarI, EciI, Esp3I, FauI, HgaI, HphI, HpyAV, MboII, MlyI, MmeI, MnlI, NmeAIII, PleI, Sapl, SfaNI, and I-TEVI.

[0198] In some specific embodiments, the nuclease used as the effector/modifier component in the chimeric modifier of the invention may be at least one type IIS nuclease or any cleavage domains thereof. These may include cleavage domains from Type IIS restriction endonucleases: AarI, Acc36I, AceIII, AclWI, AcuI, AjuI, Alol, AlwI, Alw26I, AmaCSI, ApyPI, AquII, AquIII, AquIV, ArsI, AsuHPI, BaeI, BarI, Bbr7I, BbsI, BbvI, BbvII, Bbv16II, BccI, BccI, Bce83I, BceAI, BceSIII, BceSIV, BcefI, BcgI, BciVI, Bco5I, Bco116I, BcoDI, BcoKI, BfiI, BfuI, BfuAI, BinI, Bli736I, Bme585I, BmrI, BmsI, BmuI, BpiI, BpmI, BpuAI, BpuEI, BpuSI, BsaI, BsaXI, BsbI, Bsc91I, BscAI, BseKI, BseMI, BseMII, BseRI, BseXI, BseZI, BsgI, BslFI, BsmAI, BsmBI, BsmFI, Bso31I, BsoMAI, Bsp423I, BspCNI, BspD6I, BspIS4I, BspKT5I, BspLU11III, BspQI, BspST5I, BspTNI, BspTS514I, Bst6I, Bst12I, Bst19I, Bst71I, BstBS32I, BstFZ438I, BstGZ53I, BstH9I, BstMAI, BstOZ616I, Bst31TI, BstTS5I, BstV1I, BstV2I, BsuI, Bsu6I, Bsu537I, BtgZI, BtsI, BtsIMutI, BtsCI, Bvel, Bve1B23I, CatHI, CchII, CchIII, Cco14983III, CdpI, CjeI, CjeF38011III, CjeIAIII, CjeNII, CjeNIII, CjePI, CjeP659IV, CjeYHOO2IV, CjuII, CseI, CspCI, CstMI, DraRI, DrdIV, EacI, Eam1104I, EarI, EciI, Eco31I, Eco57I, FaqI, FauI, Fph2801I, GeoICI, GsuI, HgaI, Hin4I, Hin4II, HphI, Hpy99XXII, HpyAV, HpyC1I, Ksp632I, LguI, Lsp1109I, LweI, MaqI, MboII, Mcr10I, MlyI, MmeI, MnlI, NcuI, NgoAVII, NgoAVIII, NlaCI, NmeAIII, NmeA6CIII, PciSI, PcoI, PhaI, PlaDI, PheI, PpiI, PpsI, PspOMII, PspPRI, PsrI, RceI, RdeGBII, RlaII, RleAI, RpaI, RpaBI, RpaB5I, Rtr1953I, SapI, SchI, SdeAI, SdeOSI, SfaNI, SmuI, SspD5I, SstE37I, Sth132I, StsI, TaqII, TaqIII, TsoI, TspDTI, TspGWI, TstI, Tth111II, TthHB27I, UbaF9I, UbaF11I, UbaF12I, UbaF13I, UbaF14I, Vga43942II, VpaK32I, WviI.

[0199] Still further, in some embodiments, the Type IIS restriction endonuclease used as the modifier component in the nucleic acid guided genome modifier/effector chimeric protein, of the invention, may be FokI or any fragment, variant, mutant, fusion protein or conjugate thereof. The enzyme FokI (Fok-1), naturally found in Flavobacterium okeanokoites, is a bacterial type IIS restriction endonuclease consisting of an N-terminal DNA-binding domain and a non-specific DNA cleavage domain at the C-terminal. Once the protein is bound to duplex DNA via its DNA-binding domain at the 5′-GGATG-3′ recognition site, the DNA cleavage domain is activated through dimerization and cleaves, without further sequence specificity, the first strand 9 nucleotides downstream and the second strand 13 nucleotides upstream of the nearest nucleotide of the recognition site leaving a typical 4 base overhang. DNA cleavage is mediated through the non-specific cleavage domain which also includes the dimerization surface. The dimer interface is formed by the parallel helices a4 and a5 and two loops P1 and P2 of the cleavage domain. The Fold cleavage domain's molecular mass is 21.8 kDa, being composed of 194 amino acids. In some embodiments, FokI may comprise the amino acid sequence as denoted by SEQ ID NO:256, or any fragments, derivatives and variants thereof. In yet some further embodiments, a Fold variant useful in the present invention may comprise ancestral mutations. In some specific embodiments such FokI variant may comprise the amino acid sequence as denoted by SEQ ID NO. 439 (also referred to herein in the text and the figures as “ancestral Fold”, or as “consensus FokI”. In yet some further embodiments, a FokI variant may comprise the amino acid sequence as denoted by SEQ ID NO. 486 (also referred to herein as “enhanced Fold”). It should be appreciated that the present disclosure further encompasses any variations of the specified FokI variants.

[0200] As indicated herein, the present disclosure provides an effective nucleic acid guided genome modifier or effector chimeric protein, fusion protein, conjugate or complex having reduced or abolished PAM constraint or restriction. As shown by the present examples, this chimeric protein, fusion protein, conjugate or complex comprises at least one PAM reduced or abolished Cas protein that may be any Cas protein, that may be according to non-limiting embodiments of the present disclosure at least one of ScCas9, SpCas9, an ancestral Cas9, deltaproteobacteria CasX, Cas12a, CasF-1, CasF-2, CasF-3, Cas14a1, and Cas14b5. Still further, the nucleic acid guided genome modifier or effector chimeric protein, fusion protein, conjugate or complex of the present disclosure further comprises at least one nucleic acid modified component that may be any of the nucleic acid modifier proteins discussed in the present disclosure, for example, at least one FokI protein or any variants thereof, specifically any of the variants discussed by the present disclosure, for example, any FokI that comprise at least one ancestral or consensus mutation. Examples for optional Fold variants may include “consensus FokI”, “enhanced FokI” and the like, as further specified in Example 16. Particular relevant variants are disclosed for example, in FIG. 14 and Table 18. As to the Cas protein used in the nucleic acid guided genome modifier or effector chimeric protein, fusion protein, conjugate or complex of the present disclosure may be either a native Cas protein, for example, any of the Cas proteins disclosed by the invention, specifically, the ScCas, that displays a reduce PAM constraint or restriction, specifically, a PAM sequence comprising one restricting nucleotide (NNG). Still further, in some alternative or additional embodiments, the Cas protein used in the nucleic acid guided genome modifier or effector chimeric protein, fusion protein, conjugate or complex of the present disclosure, may comprise at least one deletion, replacement and/or substitution of at least one domain, fragment or at least one amino acid residue thereof. Non-limiting examples for such relevant domains or fragments that may be deleted, replaced or include at least one substitution or mutation may be the PAM binding domain (for example, the PAM BD loop) or any fragments or amino acid residues thereof, or any PAM recognition motif (for example, the Scloop) as disclosed by the present disclosure. Specific embodiments for such PAM recognition domains or sequences may include at least one of residues Thr1330 to Arg1342 (that is also referred to herein as the PAMBD loop), residues Ile367 to Ala376 (that is also referred to herein as the Scloop), residues Lys1337 and residue Gln1338 of ScCas, or any corresponding residues of other Cas homologs (e.g., any one of SpCas9, an ancestral Cas9, deltaproteobacteria CasX, Cas12a, CasF-1, CasF-2, CasF-3, Cas14a1, or Cas14b5). In some embodiments, the PAMBD loop may be deleted, either entirely, or partially (specifically, a PAM BD loop that comprise the amino acid sequence of residues 1330 to 1342 of scCas9). In yet some further embodiments, the PAMBD loop may be replaced either entirely, or partially with PAMBD loop of homologous Cas (e.g. the PAMBD loop of SpCas). In yet some further embodiments, the PAMBD loop may be replaced either entirely, or partially with at least one NSBD, as will be discussed herein after. Examples for such nucleic acid guided genome modifier or effector chimeric protein, fusion protein, conjugate or complex are disclosed for example by Example 2, and in Tables 10A and 10B. Examples for relevant NSBDs applicable in such variants include, but are not limited to any dsDBP, for example, at least one of: at least one ZF, HTH, SH3 domain, Non-specific RVD from AvrBS3 protein family, a CBD protein and StkC, domain or protein, and any variant and fragments thereof. Still further, in some alternative or additional embodiments, the Cas used or the nucleic acid guided genome modifier or effector chimeric protein, fusion protein, conjugate or complex of the present disclosure may comprise at least one deletion, replacement and/or at least one mutation in the Scloop. In some embodiments, the nucleic acid guided genome modifier or effector chimeric protein, fusion protein, conjugate or complex of the present disclosure comprise a Cas protein having a deletion of the entire Scloop (e.g., residues Ile367 to Ala376 of ScCas), or of any fragments thereof. Specific and non-limiting embodiments for such variants can be found in Example 2, FIGS. 3, 4 and Table 10C. In yet some further embodiments, the nucleic acid guided genome modifier or effector chimeric protein, fusion protein, conjugate or complex of the present disclosure comprise a replacement of the Scloop, or of at least a fragment thereof. In some embodiments, the Scloop may be replaced by at least one NSBD protein, specifically, any of the NSBDs disclosed above. In yet some further embodiments, the Cas protein of the nucleic acid guided genome modifier or effector chimeric protein, fusion protein, conjugate or complex of the present disclosure comprises an Scloop that comprise at least one mutation or substitution of at least one residues thereof. Examples for such Scloop substitutions or mutations include, but are not limited to the Scloop QQ mutation or AA mutation. Specific and non-limiting embodiments for such variants can be found in Example 2, FIG. 4 and Table 10C. Still further, in some alternative or additional embodiments, the Cas used or the nucleic acid guided genome modifier or effector chimeric protein, fusion protein, conjugate or complex of the present disclosure may comprise at least one deletion, replacement and/or at least one mutation in the HNH-nuclease domain or any fragment thereof. In some embodiments, the variants of the invention may comprise a deletion of the entire HNH domain, or of any fragments thereof. In yet some further embodiments, the nucleic acid guided genome modifier or effector chimeric protein, fusion protein, conjugate or complex may comprise a Cas having a replacement of the HNH domain with at least one HNH domain of a Cas homologues, or alternatively, with at least one linker. It should be noted that any of the linkers disclosed by the invention may be applicable in replacing the HNH domain. In yet some further embodiments, the nucleic acid guided genome modifier or effector chimeric protein, fusion protein, conjugate or complex may comprise a Cas having a replacement of the HNH domain or parts thereof with at least one NSBD protein, specifically, any of the NSBDs disclosed above. Non-limiting embodiments for such variants may be found in Examples 2, 3 and 16, in Tables 10A, 10b, 10c, 12 and 18, and FIGS. 3, 4, and 14. Still further, in some alternative or additional embodiments, the Cas used or the nucleic acid guided genome modifier or effector chimeric protein, fusion protein, conjugate or complex of the present disclosure may comprise at least one deletion, replacement and/or at least one mutation in at least one of, the REC2 domain or any fragments thereof, the FLEX domain, or any fragments thereof and/or the RUVC domain or any fragments thereof. In some embodiments, the nucleic acid guided genome modifier or effector chimeric protein, fusion protein, conjugate or complex of the present disclosure comprise ancestral mutation in at least one of, the REC2 domain and/or the RUVC domain. Non-limiting embodiments for such variants may be found in Examples 2, 3 and 16, in Tables 10A, 10b, 10c, 12 and 18, and in FIGS. 3, 4, and 14. Still further, in some alternative or additional embodiments, the Cas used for the nucleic acid guided genome modifier or effector chimeric protein, fusion protein, conjugate or complex of the present disclosure may comprise at least one NSDB that may replace any of the Cas fragments or domains as discussed above (e.g., the PAMBD loop, the Scloop, the HNH domain, and PAMBD). In yet some further embodiments, the NSBD may be added to the Cas protein or to any of the nucleic acid guided genome modifier or effector chimeric protein, fusion protein, conjugate or complex. Such NSBD may be added at the N′-terminus of the Cas protein or the nucleic acid guided genome modifier or effector chimeric protein, fusion protein, conjugate or complex, within the Cas Protein or the nucleic acid guided genome modifier or effector chimeric protein, fusion protein, conjugate or complex, and/or at the C′-terminus of the Cas protein or the nucleic acid guided genome modifier or effector chimeric protein, fusion protein, conjugate or complex of the present disclosure. Examples for relevant NSBDs applicable in such variants include, but are not limited to any dsDBP, for example, at least one of: at least one ZF, HTH, SH3 domain, Non-specific RVD from AvrBS3 protein family, a CBD protein and StkC, domain or protein, and any variant and fragments thereof. Non-limiting examples for such variants may be found in Example 13, Table 17, that present variant having an HMGN domain at the N-terminus of the variant.

[0201] In yet some further alternative and/or additional embodiments, any of the variants discussed herein may comprise additional linkers (either short, long, positively charged etc.), as discussed by the present disclosure. In yet some further embodiments, any of the variants of the invention may further comprise additional elements, such as NLS, as discussed in the present disclosure, e.g., bipartite SV40 NLS, nucleoplasmin NLS and the like. Still further, it should be understood that the nucleic acid guided genome modifier or effector chimeric protein, fusion protein, conjugate or complex of the present disclosure may comprise any of the modifications (e.g., deletions, replacements, substitutions) discussed above, or any combinations thereof, provided that said nucleic acid guided genome modifier or effector chimeric protein, fusion protein, conjugate or complex display a reduced or abolished PAM constraint, as disclosed herein.

[0202] Thus, in some particular and non-limiting embodiments, the nucleic acid guided genome modifier or effector chimeric protein, complex or conjugate provided by the invention may be a fusion protein or chimera composed of a Cas protein having reduced or abolished PAM constraint or restriction, fused to Fold, or any fragments or derivatives thereof. In some specific embodiments, the nucleic acid guided genome modifier or effector provided by the invention may be any of the following chimeric proteins: dScCas9-FokI-ZF1, dScCas9-FokI-ZF2, dScCas9-FokI-ZF3, dScCas9-FokI-ZF4, dScCas9-FokI-LAC, dScCas9-FokI-LAC2, dScCas9-FokI-LAC3, dScCas9-FokI-LAC4, dScCas9-FokI-HIVIN, dScCas9-FokI-HIVIN2, dScCas9-FokI-HIVIN3, dScCas9-FokI-HIVIN4, dScCas9-FokI-SS 07D, dScCas9-FokI-SSO7D2, dScCas9-FokI-SSO7D3, dScCas9-FokI-SSO7D4, dScCas9-FokI-STO7, dScCas9-FokI-STO72, dScCas9-FokI-STO73, dScCas9-FokI-STO74, dScCas9-FokI-StkC, dScCas9-FokI-StkC2, dScCas9-FokI-HMGB4, dScCas9-FokI-LoopDel, dScCas9-FokI-LoopQQ, dScCas9-FokI-LoopAA, the dScCasFok, ancestral RuvC+Rec, ScLoopA, SV40+nucleoplasminNLS, the dScCasFok, ancestral RuvC+Rec, ScLoopQQ, SV40+nucleoplasminNLS, the dScCasFok, ancestral RuvC+Rec, ScLoopAA, SV40+nucleoplasminNLS, Cas9dScCasFok-2NLS, dScCasFok-HNHA-2NLS, dScCasFok-HNHA-PAMBDwholeA-2NLS, dScCasFok-HNHA-PAMBDloopA-2NLS , dScCasFok-Zinc finger-PAMBD loop replacement longer linkers-2NLS, dScCasFok-HNHA-Zinc finger-PAMBD loop replacement-2NLS, dScCasFok-HNHA-Zinc finger-PAMBD loop replacement longer linkers-2NLS, dScCasFok-Lac repressor DBD-PAMBD whole replacement-2NLS, dScCasFok-HNHA-Lac repressor DBD DBD-PAMBD whole replacement-2NLS, dScCasFok-SSO7D-PAMBD whole replacement-2NLS, dScCasFok-SSO7D-PAMBD whole replacement-longer linkers-2NLS, dScCasFok-HNHA-SSO7D-PAMBD whole replacement-2NLS, dScCasFok-HNHA-SSO7D-PAMBD whole replacement-longer linkers-2NLS, dScCasFok-STO7D-PAMBD loop replacement-longer linker-2NLS, dCasFok-HNHA-STO7D-PAMBD loop replacement-longer linker-2NLS, dCasFok-HNHA-HIV integrase DBD-PAMBD replacement whole replacement-longer linker-2NLS, dCasFok-HNHA-HIV integrase DBD-PAMBD replacement-loop replacement-longer linker-2NLS, dScCasFok-HNHΔ with longer linkers-2NLS, dScCasFok-HNHΔ replaced with SSB-2NLS, dScCasFok-HNHΔ with larger deletion-2NLS, dScCasFok-HNHΔ with positively charged linker-2NLS, dScCasFok-HNHΔ with short positively charged linker-2NLS, dScCasFok-HNHΔ with H-NS linker-2NLS, dScCasFok SV40+bipartite SV40 NLS, dScCasFok SV40+bipartite SV40 NLS 6× His, dScCasFok ancestral RuvC+Rec1/2domain SV40 and bipartite SV40 NLS, dScCasFok HNHΔ SV40+bipartiteSV40 NLS, dScCasFok HNHA with longer linker SV40+bipartiteSV40 NLS, dScCasFok HNH replaced with SSB SV40+bipartiteSV40 NLS, dScCasFok HNHΔ with longer deletion SV40+bipartiteSV40 NLS, dScCasFok HNHΔ with longer positively charged linker SV40+bipartiteSV40 NLS, dScCasFok HNHΔ with shorter positively charged linker SV40+bipartiteSV40 NLS, dScCasFok HNH replaced with StkC SV40+bipartiteSV40 NLS, dScCasFok HNHΔ with HNS linker SV40+bipartiteSV40 NLS, dScCasFok ancestral RuvC+Rec1/2HNHΔ S V40+bipartiteS V40 NLS, dScCasFok ancestral RuvC+Rec1/2HNHΔ with longer linker SV40+bipartiteSV40 NLS, dScCasFok ancestral RuvC+Rec1/2HNH replaced with SSB SV40+bipartiteSV40 NLS, dScCasFok ancestral RuvC+Rec1/2HNHΔ with longer deletion SV40+bipartiteSV40 NLS, dScCasFok ancestral RuvC+Rec1/2HNHΔ with longer positively charged linker SV40+bipartiteSV40 NLS, dScCasFok ancestral RuvC+Rec1/2HNHΔ with shorter positively charged linker SV40+bipartiteSV40 NLS, dScCasFok ancestral RuvC+Rec1/2HNH replaced with StkC SV40+bipartiteSV40 NLS, dScCasFok ancestral RuvC+Rec1/2HNHΔ with HNS linker SV40+bipartiteSV40 NLS; dScCasFok,HNHA, whole PAMBD replaced with Sto7, longer linkers, SV40+nucleoplasmin NLS; dScCasFok,HNHA, PAMBD loop replaced with Sto7, longer linkers, SV40+nucleoplasmin NLS; dScCasFok,HNHA,PAMBD loop replaced with HMGN, SV40+nucleoplasmin NLS; dScCasFok,HNHA, whole PAMBD replaced with HMGN, SV40+nucleoplasmin NLS; dScCasFok,HNHA,PAMBD loop replaced with StkC, SV40+nucleoplasmin NLS; dScCasFok,HNHA,whole PAMBD replaced with StkC, SV40+nucleoplasmin NLS; dScCasFok, S V40+bipartiteS V40, ancestral mutations in RuvC+REC1/2 domain, Scloop deletion; dScCasFok,SV40+bipartiteSV40, ancestral mutations in RuvC+REC1/2 domain, Scloop deletion, 6His tag; dScCasFok,SV40+bipartiteSV40, ancestral mutations in RuvC+REC 1/2 domain, Scloop deletion, HNHdeletion; dScCasFok,SV40+bipartiteSV40, ancestral mutations in RuvC+REC1/2 domain, Scloop deletion, HNHdeletion, 6His tag; dScCasFok,SV40+bipartiteSV40, ancestral mutations in RuvC+REC1/2 domain, Scloop deletion, HNHdeletion, 6His tag; dScCasFok, SV40+bipartiteSV40, ancestral mutations in RuvC+REC1/2 domain, Scloop QQmutant, HNHdeletion, 6His tag; dScCasFok, SV40+bipartiteSV40, ancestral mutations in RuvC+REC 1/2 domain, Scloop AAmutant, HNHdeletion, 6His tag; dScCasFok, SV40+bipartiteSV40, ancestral mutations in RuvC+REC1/2 domain, Scloop Sp Replacement, HNHdeletion, 6His tag; dScCasFok, SV40+bipartiteSV40, ancestral mutations in RuvC+REC1/2 domain, Scloop deletion, HNHdeletion, 6His tag; dScCasFok, SV40+bipartiteSV40, ancestral mutations in RuvC+REC 1/2 domain, Scloop QQmutant, HNHdeletion, 6His tag; dScCasFok, SV40+bipartiteSV40, ancestral mutations in RuvC+REC1/2 domain, Scloop AAmutant, HNHdeletion, 6His tag; dScCasFok, SV40+nucleoplasmin, ancestral mutations in RuvC+REC1/2 domain, Scloop deletion, HNH deletion, PAM replaced with Zinc finger; dScCasFok, SV40+nucleoplasmin, ancestral mutations in RuvC+REC1/2 domain, Scloop deletion, HNH deletion, whole PAMBD replaced with LacI DNA binding domain; dScCasFok, SV40+nucleoplasmin, ancestral mutations in RuvC+REC1/2 domain, Scloop deletion, HNH deletion, whole PAMBD replaced with SSO7D; dScCasFok, SV40+nucleoplasmin, ancestral mutations in RuvC+REC1/2 domain, Scloop deletion, HNH deletion, PAMBD loop replaced with HMGN; dScCasFok, SV40+nucleoplasmin, ancestral mutations in RuvC+REC1/2 domain, Scloop deletion, HNH deletion, whole PAMBD replaced with STO7; dScCasFok, SV40+nucleoplasmin, ancestral mutations in RuvC+REC1/2 domain, Scloop QQmutation, HNH deletion, PAMBD loop replaced with Zinc finger; dScCasFok, SV40+nucleoplasmin, ancestral mutations in RuvC+REC1/2 domain, Scloop QQmutation HNH deletion, whole PAMBD replaced with Lad DNA binding domain; dScCasFok, SV40+nucleoplasmin, ancestral mutations in RuvC+REC1/2 domain, Scloop QQmutation, HNH deletion, whole PAMBD replaced with SSO7D; dScCasFok, SV40+nucleoplasmin, ancestral mutations in RuvC+REC1/2 domain, Scloop QQmutation, HNH deletion, PAMBD loop replaced with HMGN; dScCasFok, SV40+nucleoplasmin, ancestral mutations in RuvC+REC1/2 domain, Scloop QQmutation, HNH deletion, whole PAMBD replaced with STO7; dScCasFok, SV40+nucleoplasmin, ancestral mutations in RuvC+REC1/2 domain, Scloop AAmutation, HNH deletion, PAMBD loop replaced with Zinc finger; dScCasFok, SV40+nucleoplasmin, ancestral mutations in RuvC+REC1/2 domain, Scloop AAmutation HNH deletion, wholePAMBD replaced with LacI DNA binding domain; dScCasFok, SV40+nucleoplasmin, ancestral mutations in RuvC+REC1/2 domain, Scloop AAmutation, HNH deletion, whole PAMBD replaced with SSO7D; dScCasFok, SV40+nucleoplasmin, ancestral mutations in RuvC+REC1/2 domain, Scloop AAmutation, HNH deletion, PAMBD loop replaced with HMGN; dScCasFok, SV40+nucleoplasmin, ancestral mutations in RuvC+REC1/2 domain, Scloop AAmutation, HNH deletion, whole PAMBD replaced with STO7; dScCasFok, SV40+nucleoplasmin, ancestral mutations in RuvC+REC1/2 domain, Scloop SpReplacement, HNH deletion, PAMBD loop replaced with Zinc finger; dScCasFok, SV40+nucleoplasmin, ancestral mutations in RuvC+REC1/2 domain, Scloop SpReplacement HNH deletion, whole PAMBD replaced with LacI DNA binding domain; dScCasFok, SV40+nucleoplasmin, ancestral mutations in RuvC+REC1/2 domain, Scloop SpReplacement HNH deletion, whole PAMBD replaced with SSO7D; dScCasFok, SV40+nucleoplasmin, ancestral mutations in RuvC+REC1/2 domain, Scloop SpReplacement HNH deletion, PAMBD loop replaced with HMGN; dScCasFok, SV40+nucleoplasmin, ancestral mutations in RuvC+REC1/2 domain, Scloop SpReplacement HNH deletion, whole PAMBD replaced with STO7 or any variants or mutants thereof.

[0203] Still further, in some specific embodiments of the present disclosure, the nucleic acid guided genome modifier or effector provided by the invention may be dScCasFok, SV40 NLS. In yet some further embodiments, the nucleic acid guided genome modifier or effector provided by the invention may be the dScCasFok, SV40+SV40 bipartite NLS. Still further, in some embodiments, the nucleic acid guided genome modifier or effector provided by the invention may be the dCasFok, FokI consensus, SV40+bipartiteSV40. In certain embodiments, the nucleic acid guided genome modifier or effector provided by the invention may be the dCasFok, FokI consensus, SV40+bipartiteSV40, ancestral mutations in RuvC+REC1/2 domain, HNH deletion. In certain embodiments, the nucleic acid guided genome modifier or effector provided by the invention may be the dScCasFok, SV40+nucleoplasmin, ancestral mutations in RuvC+REC1/2 domain, Scloop QQmutation HNH deletion, whole PAMBD replaced with LacI DNA binding domain. Still Further, in certain embodiments, the nucleic acid guided genome modifier or effector provided by the invention may be the dScCasFok, SV40+nucleoplasmin, ancestral mutations in RuvC+REC1/2 domain, Scloop SpReplacement, HNH deletion, PAMBD loop replaced with Zinc finger. In yet some further embodiments, the nucleic acid guided genome modifier or effector provided by the invention may be the dScCasFok, SV40+nucleoplasmin, ancestral mutations in RuvC+REC1/2 domain, Scloop SpReplacement HNH deletion, whole PAMBD replaced with SSO7D. In certain embodiments, the nucleic acid guided genome modifier or effector provided by the invention may be the dScCasFok, SV40+nucleoplasmin, ancestral mutations in RuvC+REC1/2 domain, Scloop SpReplacement HNH deletion, PAMBD loop replaced with HMGN. In certain embodiments, the nucleic acid guided genome modifier or effector provided by the invention may be the dScCasFok, SV40+nucleoplasmin, ancestral mutations in RuvC+REC1/2 domain, Scloop SpReplacement HNH deletion, whole PAMBD replaced with STO7.

[0204] In some embodiment, the dScCas9-FokI-ZF1, may comprise an amino acid sequence as denoted by SEQ ID NO. 24, dScCas9-FokI-ZF2, may comprise an amino acid sequence as denoted by as denoted by SEQ ID NO. 25, dScCas9-FokI-ZF3 may comprise an amino acid sequence as denoted by, as denoted by SEQ ID NO. 26, dScCas9-FokI-ZF4 may comprise an amino acid sequence as denoted by SEQ ID NO. 27, dScCas9-FokI-LAC may comprise an amino acid sequence as denoted by SEQ ID NO. 28, dScCas9-FokI-LAC2 may comprise an amino acid sequence as denoted by SEQ ID NO. 29, dScCas9-FokI-LAC3 may comprise an amino acid sequence as denoted by SEQ ID NO. 30, dScCas9-FokI-LAC4 may comprise an amino acid sequence as denoted by, as denoted by SEQ ID NO. 31, dScCas9-FokI-HIVIN may comprise an amino acid sequence as denoted by SEQ ID NO. 32, dScCas9-FokI-HIVIN2 may comprise an amino acid sequence as denoted by SEQ ID NO. 33, dScCas9-FokI-HIVIN3 may comprise an amino acid sequence as denoted by SEQ ID NO. 34, dScCas9-FokI-HIVIN4 may comprise an amino acid sequence as denoted by SEQ ID NO. 35, dScCas9-FokI-SSO7D may comprise an amino acid sequence as denoted by SEQ ID NO. 36, dScCas9-FokI-SSO7D2 may comprise an amino acid sequence as denoted by SEQ ID NO. 37, dScCas9-FokI-SSO7D3 may comprise an amino acid sequence as denoted by SEQ ID NO. 38, dScCas9-FokI-SSO7D4 may comprise an amino acid sequence as denoted by SEQ ID NO. 39, dScCas9-FokI-STO7 may comprise an amino acid sequence as denoted by SEQ ID NO. 40, dScCas9-FokI-ST072 may comprise an amino acid sequence as denoted by, as denoted by SEQ ID NO. 41, dScCas9-FokI-ST073 may comprise an amino acid sequence as denoted by SEQ ID NO. 42, dScCas9-FokI-ST074 may comprise an amino acid sequence as denoted by SEQ ID NO. 43, dScCas9-FokI-StkC may comprise an amino acid sequence as denoted by SEQ ID NO. 44, dScCas9-FokI-StkC2, as denoted by SEQ ID NO. 266 and dScCas9-FokI-HMGB4 as denoted by SEQ ID NO.267. Chimeras based on variants of Cas9 (truncated versions) may include the dScCas9-FokI.dHNH.dREC2, as denoted by SEQ ID NO. 14, the dScCas9-FokI.dHNH.dFLEX, as denoted by SEQ ID NO. 15, the dScCas9-FokI.dREC2.dFLEX, as denoted by SEQ ID NO. 16, dScCas9-FokI.dHNH.dREC2.dFLEX, as denoted by SEQ ID NO. 17, the dScCas9-FokI-LoopDel may comprise an amino acid sequence as denoted by SEQ ID NO. 345, the dScCas9-FokI-LoopQQ may comprise an amino acid sequence as denoted by SEQ ID NO. 346, the dScCas9-FokI-LoopAA may comprise an amino acid sequence as denoted by SEQ ID NO. 347, the dScCas9-FokI-ScLoop ASp may comprise an amino acid sequence as denoted by SEQ ID NO. 348, the dScCasFok, ancestral RuvC+Rec1/2, ScLoopA, SV40+nucleoplasminNLS may comprise an amino acid sequence as denoted by SEQ ID NO. 394, the dScCasFok, ancestral RuvC+Rec1/2, ScLoopQQ, SV40+nucleoplasminNLS may comprise an amino acid sequence as denoted by SEQ ID NO. 395, the dScCasFok, ancestral RuvC+Rec1/2, ScLoopAA, SV40+nucleoplasminNLS may comprise an amino acid sequence as denoted by SEQ ID NO. 396, the dScCasFok-2NLS may comprise an amino acid sequence as denoted by SEQ ID NO: 330, the dScCasFok-HNHA-2NLS may comprise an amino acid sequence as denoted by SEQ ID NO:331, the dScCasFok-HNHA-PAMBD whole A-2NLS may comprise an amino acid sequence as denoted by SEQ ID NO: 332, the dScCasFok-HNHA-PAMBDloopA-2NLS may comprise an amino acid sequence as denoted by SEQ ID NO: 333, the dScCasFok-Zinc finger-PAMBD loop replacement-longer linkers-2NLS may comprise an amino acid sequence as denoted by SEQ ID NO: 334, the dScCasFok-HNHA-Zinc finger-PAMBD loop replacement-2NLS may comprise an amino acid sequence as denoted by SEQ ID NO: 314, the dScCasFok-HNHA-Zinc finger-PAMBD loop replacement-longer linkers-2NLS may comprise an amino acid sequence as denoted by SEQ ID NO: 315, the dScCasFok-Lac repressor DBD-PAMBD whole replacement-2NLS may comprise an amino acid sequence as denoted by SEQ ID NO: 335, the dScCasFok-HNHA-Lac repressor DBD-PAMBD whole replacement-2NLS may comprise an amino acid sequence as denoted by SEQ ID NO: 316, the dScCasFok-SSO7D-PAMBD whole replacement-2NLS may comprise an amino acid sequence as denoted by SEQ ID NO: 336, the dScCasFok-SSO7D-PAMBD whole replacement-longer linkers-2NLS, may comprise an amino acid sequence as denoted by SEQ ID NO: 337, the dScCasFok-HNHA-5507D-PAMBD whole replacement-2NLS may comprise an amino acid sequence as denoted by SEQ ID NO: 317, the dScCasFok-HNHA-5507D-PAMBD whole replacement-longer linkers-2NLS may comprise an amino acid sequence as denoted by SEQ ID NO: 338, the dScCasFok-STO7D-PAMBD loop replacement-longer linker-2NLS may comprise an amino acid sequence as denoted by SEQ ID NO: 339, the dCasFok-HNHA-STO7D-PAMBD loop replacement-longer linker-2NLS may comprise an amino acid sequence as denoted by SEQ ID NO: 318, the dCasFok-HNHA-HIV integrase DBD-PAMBD replacement whole replacement-longer linker-2NLS may comprise an amino acid sequence as denoted by SEQ ID NO: 340, the dCasFok-HNHA-HIV integrase DBD-PAMBD replacement-loop replacement-longer linker-2NLS may comprise an amino acid sequence as denoted by SEQ ID NO: 341, the dScCasFok-HNHΔ with longer linkers-2NLS may comprise an amino acid sequence as denoted by SEQ ID NO: 342, the dScCasFok-HNHΔ replaced with SSB-2NLS may comprise an amino acid sequence as denoted by SEQ ID NO: 343, the dScCasFok-HNHΔ with larger deletion-2NLS may comprise an amino acid sequence as denoted by SEQ ID NO: 344, the dScCasFok-HNHΔ with positively charged linker-2NLS may comprise an amino acid sequence as denoted by SEQ ID NO: 349, the dScCasFok-HNHΔ with short positively charged linker-2NLS may comprise an amino acid sequence as denoted by SEQ ID NO: 350, the dScCasFok-HNHΔ with H-NS linker-2NLS may comprise an amino acid sequence as denoted by SEQ ID NO: 351, the dScCasFok SV40+bipartite SV40 NLS may comprise an amino acid sequence as denoted by SEQ ID NO: 375, the dScCasFok SV40+bipartite SV40 NLS 6× His may comprise an amino acid sequence as denoted by SEQ ID NO: 376, the dScCasFok ancestral RuvC+Rec1/2domain SV40 and bipartite SV40 NLS may comprise an amino acid sequence as denoted by SEQ ID NO: 377, the dScCasFok HNHA SV40+bipartiteSV40 NLS may comprise an amino acid sequence as denoted by SEQ ID NO: 378, the dScCasFok HNHΔ with longer linker SV40+bipartiteSV40 NLS may comprise an amino acid sequence as denoted by SEQ ID NO: 379, the dScCasFok, HNH replaced with SSB SV40+bipartiteSV40 NLS may comprise an amino acid sequence as denoted by SEQ ID NO: 380, the dScCasFok, HNHΔ with longer deletion SV40+bipartiteSV40 NLS may comprise an amino acid sequence as denoted by SEQ ID NO: 381, the dScCasFok HNHΔ with longer positively charged linker SV40+bipartiteSV40 NLS may comprise an amino acid sequence as denoted by SEQ ID NO: 382, the dScCasFok HNHΔ with shorter positively charged linker SV40+bipartiteSV40 NLS may comprise an amino acid sequence as denoted by SEQ ID NO: 383, the dScCasFok HNH replaced with StkC SV40+bipartiteSV40 NLS may comprise an amino acid sequence as denoted by SEQ ID NO: 384, the dScCasFok HNHΔ with HNS linker SV40+bipartiteSV40 NLS may comprise an amino acid sequence as denoted by SEQ ID NO: 385, the dScCasFok ancestral RuvC+Rec1/2HNHA, SV40+bipartiteSV40 NLS may comprise an amino acid sequence as denoted by SEQ ID NO: 386, the dScCasFok ancestral RuvC+Rec1/2HNHΔ with longer linker SV40+bipartiteSV40 NLS may comprise an amino acid sequence as denoted by SEQ ID NO: 387, the dScCasFok ancestral RuvC+Rec1/2HNH replaced with SSB SV40+bipartiteSV40 NLS may comprise an amino acid sequence as denoted by SEQ ID NO: 388, the dScCasFok ancestral RuvC+Rec1/2HNHΔ with longer deletion SV40+bipartiteSV40 NLS may comprise an amino acid sequence as denoted by SEQ ID NO: 389, the dScCasFok ancestral RuvC+Rec1/2HNHΔ with longer positively charged linker SV40+bipartite SV40 NLS may comprise an amino acid sequence as denoted by SEQ ID NO: 390, the dScCasFok ancestral RuvC+Rec1/2HNHΔ with shorter positively charged linker SV40+bipartiteSV40 NLS may comprise an amino acid sequence as denoted by SEQ ID NO: 391, the dScCasFok ancestral RuvC+Rec1/2HNH replaced with StkC SV40+bipartiteSV40 NLS may comprise an amino acid sequence as denoted by SEQ ID NO: 392, the dScCasFok ancestral RuvC+Rec1/2HNHΔ with HNS linker SV40+bipartiteSV40 NLS may comprise an amino acid sequence as denoted by SEQ ID NO: 393, dScCasFok,HNHA, whole PAMBD replaced with Sto7, longer linkers, SV40+nucleoplasmin NLS may comprise an amino acid sequence as denoted by SEQ ID NO. 433; dScCasFok,HNHA, PAMBD loop replaced with Sto7,1onger linkers, SV40+nucleoplasmin NLS may comprise an amino acid sequence as denoted by SEQ ID NO. 434; dScCasFok,HNHA,PAMBD loop replaced with HMGN, SV40+nucleoplasmin NLS may comprise an amino acid sequence as denoted by SEQ ID NO. 435; dScCasFok,HNHA, whole PAMBD replaced with HMGN , SV40+nucleoplasmin NLS may comprise an amino acid sequence as denoted by SEQ ID NO. 436; dScCasFok,HNHA,PAMBD loop replaced with StkC, SV40+nucleoplasmin NLS may comprise an amino acid sequence as denoted by SEQ ID NO. 437; dScCasFok,HNHA,whole PAMBD replaced with StkC, SV40+nucleoplasmin NLS may comprise an amino acid sequence as denoted by SEQ ID NO. 438; the dScCasFok,SV40+bipartiteSV40, ancestral mutations in RuvC+REC1/2 domain, Scloop deletion may comprise an amino acid sequence as denoted by SEQ ID NO. 450; the dScCasFok,SV40+bipartiteSV40, ancestral mutations in RuvC+REC1/2 domain, Scloop deletion, 6His tag may comprise an amino acid sequence as denoted by SEQ ID NO. 451; the dScCasFok,SV40+bipartiteSV40, ancestral mutations in RuvC+REC1/2 domain, Scloop deletion, HNHdeletion may comprise an amino acid sequence as denoted by SEQ ID NO. 452; the dScCasFok,SV40+bipartiteSV40, ancestral mutations in RuvC+REC1/2 domain, Scloop deletion, HNHdeletion, 6His tag may comprise an amino acid sequence as denoted by SEQ ID NO. 453; the dScCasFok,SV40+bipartiteSV40, ancestral mutations in RuvC+REC1/2 domain, Scloop deletion, HNHdeletion, 6His tag may comprise an amino acid sequence as denoted by SEQ ID NO. 454; the dScCasFok, SV40+bipartiteSV40, ancestral mutations in RuvC+REC1/2 domain, Scloop QQmutant, HNHdeletion, 6His tag may comprise an amino acid sequence as denoted by SEQ ID NO. 455; the dScCasFok, SV40+bipartiteSV40, ancestral mutations in RuvC+REC1/2 domain, Scloop AAmutant, HNHdeletion, 6His tag may comprise an amino acid sequence as denoted by SEQ ID NO. 456; the dScCasFok, SV40+bipartiteSV40, ancestral mutations in RuvC+REC1/2 domain, Scloop Sp Replacement, HNHdeletion, 6His tag may comprise an amino acid sequence as denoted by SEQ ID NO. 457; the dScCasFok, SV40+bipartiteSV40, ancestral mutations in RuvC+REC1/2 domain, Scloop deletion, HNHdeletion, 6His tag may comprise an amino acid sequence as denoted by SEQ ID NO. 458; the dScCasFok, SV40+bipartiteSV40, ancestral mutations in RuvC+REC1/2 domain, Scloop QQmutant, HNHdeletion, 6His tag may comprise an amino acid sequence as denoted by SEQ ID NO. 459; the dScCasFok, SV40+bipartiteSV40, ancestral mutations in RuvC+REC1/2 domain, Scloop AAmutant, HNHdeletion, 6His tag may comprise an amino acid sequence as denoted by SEQ ID NO. 460; the dScCasFok, SV40+nucleoplasmin, ancestral mutations in RuvC+REC1/2 domain, Scloop deletion, HNH deletion, PAMBD loop replaced with Zinc finger may comprise an amino acid sequence as denoted by SEQ ID NO. 461; the dScCasFok, SV40+nucleoplasmin, ancestral mutations in RuvC+REC1/2 domain, Scloop deletion, HNH deletion, whole PAMBD replaced with LacI DNA binding domain may comprise an amino acid sequence as denoted by SEQ ID NO. 462; the dScCasFok, SV40+nucleoplasmin, ancestral mutations in RuvC+REC1/2 domain, Scloop deletion, HNH deletion, whole PAMBD replaced with SSO7D may comprise an amino acid sequence as denoted by SEQ ID NO. 463; the dScCasFok, SV40+nucleoplasmin, ancestral mutations in RuvC+REC1/2 domain, Scloop deletion, HNH deletion, PAMBD loop replaced with HMGN may comprise an amino acid sequence as denoted by SEQ ID NO. 464; the dScCasFok, SV40+nucleoplasmin, ancestral mutations in RuvC+REC1/2 domain, Scloop deletion, HNH deletion, whole PAMBD replaced with STO7 may comprise an amino acid sequence as denoted by SEQ ID NO. 465; the dScCasFok, SV40+nucleoplasmin, ancestral mutations in RuvC+REC1/2 domain, Scloop QQmutation, HNH deletion, PAMBD loop replaced with Zinc finger may comprise an amino acid sequence as denoted by SEQ ID NO. 466; the dScCasFok, SV40+nucleoplasmin, ancestral mutations in RuvC+REC1/2 domain, Scloop QQmutation HNH deletion, whole PAMBD replaced with LacI DNA binding domain may comprise an amino acid sequence as denoted by SEQ ID NO. 467; the dScCasFok, SV40+nucleoplasmin, ancestral mutations in RuvC+REC1/2 domain, Scloop QQmutation, HNH deletion, whole PAMBD replaced with SSO7D may comprise an amino acid sequence as denoted by SEQ ID NO. 468; the dScCasFok, SV40+nucleoplasmin, ancestral mutations in RuvC+REC1/2 domain, Scloop QQmutation, HNH deletion, PAMBD loop replaced with HMGN may comprise an amino acid sequence as denoted by SEQ ID NO. 469; the dScCasFok, SV40+nucleoplasmin, ancestral mutations in RuvC+REC1/2 domain, Scloop QQmutation, HNH deletion, whole PAMBD replaced with STO7 may comprise an amino acid sequence as denoted by SEQ ID NO. 470; the dScCasFok, SV40+nucleoplasmin, ancestral mutations in RuvC+REC1/2 domain, Scloop AAmutation, HNH deletion, PAMBD loop replaced with Zinc finger may comprise an amino acid sequence as denoted by SEQ ID NO. 471; the dScCasFok, SV40+nucleoplasmin, ancestral mutations in RuvC+REC1/2 domain, Scloop AAmutation HNH deletion, whole PAMBD replaced with LacI DNA binding domain may comprise an amino acid sequence as denoted by SEQ ID NO. 472; the dScCasFok, SV40+nucleoplasmin, ancestral mutations in RuvC+REC1/2 domain, Scloop AAmutation, HNH deletion, whole PAMBD replaced with SSO7D may comprise an amino acid sequence as denoted by SEQ ID NO. 473; the dScCasFok, SV40+nucleoplasmin, ancestral mutations in RuvC+REC1/2 domain, Scloop AAmutation, HNH deletion, PAMBD loop replaced with HMGN may comprise an amino acid sequence as denoted by SEQ ID NO. 474; the dScCasFok, SV40+nucleoplasmin, ancestral mutations in RuvC+REC1/2 domain, Scloop AAmutation, HNH deletion, whole PAMBD replaced with STO7 may comprise an amino acid sequence as denoted by SEQ ID NO. 475; the dScCasFok, SV40+nucleoplasmin, ancestral mutations in RuvC+REC1/2 domain, Scloop SpReplacement, HNH deletion, PAMBD loop replaced with Zinc finger may comprise an amino acid sequence as denoted by SEQ ID NO. 476; the dScCasFok, SV40+nucleoplasmin, ancestral mutations in RuvC+REC1/2 domain, Scloop SpReplacement HNH deletion, whole PAMBD replaced with LacI DNA binding domain may comprise an amino acid sequence as denoted by SEQ ID NO. 477; the dScCasFok, SV40+nucleoplasmin, ancestral mutations in RuvC+REC1/2 domain, Scloop SpReplacement HNH deletion, whole PAMBD replaced with SSO7D may comprise an amino acid sequence as denoted by SEQ ID NO. 478; the dScCasFok, SV40+nucleoplasmin, ancestral mutations in RuvC+REC1/2 domain, Scloop SpReplacement HNH deletion, PAM replaced with HMGN may comprise an amino acid sequence as denoted by SEQ ID NO. 479; the dScCasFok, SV40+nucleoplasmin, ancestral mutations in RuvC+REC1/2 domain, Scloop SpReplacement HNH deletion, PAM replaced with STO7 may comprise an amino acid sequence as denoted by SEQ ID NO. 480. Still further, in some specific embodiments of the present disclosure, the nucleic acid guided genome modifier or effector provided by the invention may be the dScCasFok, SV40 NLS (referred to herein as TG11241). In some embodiments, such nucleic acid guided genome modifier or effector may comprise the amino acid sequence as denoted by SEQ ID NO. 2.

[0205] In some embodiments, the nucleic acid guided genome modifier or effector provided by the invention may be the dScCasFok, SV40+SV40 bipartite NLS (14280). In more specific embodiments such the nucleic acid guided genome modifier or effector may comprise the amino acid sequence as denoted by SEQ ID NO. 375.

[0206] In some embodiments, the nucleic acid guided genome modifier or effector provided by the invention may be the dCasFok, FokI consensus, SV40+bipartiteSV40 (14659). In more specific embodiments such the nucleic acid guided genome modifier or effector may comprise the amino acid sequence as denoted by SEQ ID NO. 444.

[0207] In some embodiments, the nucleic acid guided genome modifier or effector provided by the invention may be the dCasFok, FokI consensus, SV40+bipartiteSV40, ancestral mutations in RuvC+REC1/2 domain, HNH deletion (14667). In more specific embodiments such the nucleic acid guided genome modifier or effector may comprise the amino acid sequence as denoted by SEQ ID NO. 448.

[0208] In some embodiments, the nucleic acid guided genome modifier or effector provided by the invention may be the dScCasFok, SV40+nucleoplasmin, ancestral mutations in RuvC+REC1/2 domain, Scloop QQmutation HNH deletion, whole PAMBD replaced with LacI DNA binding domain (14643). In more specific embodiments such the nucleic acid guided genome modifier or effector may comprise the amino acid sequence as denoted by SEQ ID NO.467.

[0209] In some embodiments, the nucleic acid guided genome modifier or effector provided by the invention may be the dScCasFok, SV40+nucleoplasmin, ancestral mutations in RuvC+REC1/2 domain, Scloop SpReplacement, HNH deletion, PAMBD loop replaced with Zinc finger (14652). In more specific embodiments such the nucleic acid guided genome modifier or effector may comprise the amino acid sequence as denoted by SEQ ID NO. 476.

[0210] In some embodiments, the nucleic acid guided genome modifier or effector provided by the invention may be the dScCasFok, SV40+nucleoplasmin, ancestral mutations in RuvC+REC1/2 domain, Scloop SpReplacement HNH deletion, whole PAMBD replaced with SSO7D (14654). In more specific embodiments such the nucleic acid guided genome modifier or effector may comprise the amino acid sequence as denoted by SEQ ID NO. 478.

[0211] In some embodiments, the nucleic acid guided genome modifier or effector provided by the invention may be the dScCasFok, SV40+nucleoplasmin, ancestral mutations in RuvC+REC1/2 domain, Scloop SpReplacement HNH deletion, PAMBD loop replaced with HMGN (14655). In more specific embodiments such the nucleic acid guided genome modifier or effector may comprise the amino acid sequence as denoted by SEQ ID NO. 479.

[0212] In some embodiments, the nucleic acid guided genome modifier or effector provided by the invention may be the dScCasFok, SV40+nucleoplasmin, ancestral mutations in RuvC+REC1/2 domain, Scloop SpReplacement HNH deletion, whole PAMBD replaced with STO7 (14656). In more specific embodiments such the nucleic acid guided genome modifier or effector may comprise the amino acid sequence as denoted by SEQ ID NO. 480.

[0213] In yet some further embodiments, the nucleic acid guided genome modifier chimeric protein of the invention may comprise as the effector/modifier component, any other nuclease as discussed above. In some specific and non-limiting embodiments, such chimeras may include the dScCas9-CspCI that comprise in some embodiments the amino acid sequence as denoted by SEQ ID NO. 288, the dScCas9-BsgI, that comprise in some embodiments the amino acid sequence as denoted by SEQ ID NO. 289, the dScCas9-BbvI, that comprise in some embodiments the amino acid sequence as denoted by SEQ ID NO. 290.

[0214] In yet some embodiments, the invention further encompasses nucleic acid guided genome modifier chimeric protein that may comprise as the PAM-free or reduced Cas protein, any Cas protein, for example, CasX, dCas14 or ancestral Cas, fused to at least one effector/modifier that may be a nuclease such as FokI. Examples for such chimeras may include the dCasX-FokI, that comprise in some embodiments the amino acid sequence as denoted by SEQ ID NO. 45, the dCasX-FokI DNTSB, that comprise in some embodiments the amino acid sequence as denoted by SEQ ID NO. 46, the dCasX-FokI dTSL, that comprise in some embodiments the amino acid sequence as denoted by SEQ ID NO. 47, the dCasX-FokI dNTSB dTSL, that comprise in some embodiments the amino acid sequence as denoted by SEQ ID NO. 48, the dCasX-FokI (default linker), that comprise in some embodiments the amino acid sequence as denoted by SEQ ID NO. 210, the dCasX-FokI (longer linker), that comprise in some embodiments the amino acid sequence as denoted by SEQ ID NO. 211, the dCasX-FokI (shorter linker, small flexible amino acids and uncharged), that comprise in some embodiments the amino acid sequence as denoted by SEQ ID NO. 212, and the dCasX-FokI (linker composed of small uncharged amino acids, and contains nuclear localization tag), that comprise in some embodiments the amino acid sequence as denoted by SEQ ID NO. 213.

[0215] Still further, in some embodiments, the invention further encompasses variants of the nucleic acid guided genome modifier chimeric protein of the present disclosure that comprises at least one PAM-free or reduced CasX protein, as discussed above. In some specific embodiments, such variants may comprise at least one substitution in at least one amino acid residue. In some further embodiments, the PAM-free or reduced CasX-FokI chimeras of the present disclosure may comprise at least one substitution in at least one of K226, S521K, 5525 and/or G577K. In some embodiments, these substitutions may be included in each of the PAM-free or reduced CasX protein of the present disclosure, specifically, in at least one of the chimeras of SEQ ID NO. 45, 46, 47, 48, 210, 211, 212, and 213. In yet some specific embodiments, the PAM-free or reduced CasX-FokI chimeras of the present disclosure may comprise at least one substitution in at least one of K226, specifically, substituting lysine K226 to Alanine, specifically, K226A. Thus, in some embodiments, the chimeras of at least one of SEQ ID NO. 45, 46, 47, 48, 210, 211, 212, and 213, may comprise a K226A substitution. In yet some alternative embodiments, the K226 may be substituted to glutamin, specifically, K226Q. Thus, in some embodiments, the chimeras of at least one of SEQ ID NO. 45, 46, 47, 48, 210, 211, 212, and 213, may comprise a K226Q substitution. Still further, in some embodiments serine 521 may be substituted to lysine, specifically, S521K. Thus, in some embodiments, the chimeras of at least one of SEQ ID NO. 45, 46, 47, 48, 210, 211, 212, and 213, may comprise a S521K substitution. In yet some further embodiments serine 525 may be substituted to lysine, specifically, S525K. Thus, in some embodiments, the chimeras of at least one of SEQ ID NO. 45, 46, 47, 48, 210, 211, 212, and 213, may comprise a S525K substitution.

[0216] In yet some further embodiments, the chimeras of the invention may comprise substitution of glycine 577 to lysine, specifically G577K. Thus, in some embodiments, the chimeras of at least one of SEQ ID NO. 45, 46, 47, 48, 210, 211, 212, and 213, may comprise a G577K substitution.

[0217] In some embodiments, the nucleic acid guided genome modifier chimeric protein provided by the invention may comprise as the PAM-free or reduced Cas protein, the dCas14 protein. Non-limiting examples for such nucleic acid guided genome modifier chimeric protein may include the dCas14-FokI, that in some embodiments may comprise the amino acid sequence as denoted by SEQ ID NO. 271, the StkC-dCas14-FokI, that in some embodiments may comprise the amino acid sequence as denoted by SEQ ID NO. 272, the HIVINT-dCas14-FokI, that in some embodiments may comprise the amino acid sequence as denoted by SEQ ID NO. 273, the SS07D-dCas14-FokI, that in some embodiments may comprise the amino acid sequence as denoted by SEQ ID NO. 274, the HMGN-dCas14-FokI, that in some embodiments may comprise the amino acid sequence as denoted by SEQ ID NO. 275, the HMGN-dCas14-FokI-HMGB1, that in some embodiments may comprise the amino acid sequence as denoted by SEQ ID NO. 276, the HMGN-dCas14-FokI-HMGB3, that in some embodiments may comprise the amino acid sequence as denoted by SEQ ID NO. 277, the HMGN-dCas14-FokI-HMGB4, that in some embodiments may comprise the amino acid sequence as denoted by SEQ ID NO. 278, the dCas14-FokI-HMGB1, that in some embodiments may comprise the amino acid sequence as denoted by SEQ ID NO. 279, the dCas14-FokI-HMGB3, that in some embodiments may comprise the amino acid sequence as denoted by SEQ ID NO. 280 and the dCas14-FokI-HMGB4, that in some embodiments may comprise the amino acid sequence as denoted by SEQ ID NO. 281.

[0218] Non-limiting examples for such nucleic acid guided genome modifier chimeric protein may comprise the HMGN-dScCas-FokI, that in some embodiments may comprise the amino acid sequence as denoted by SEQ ID NO. 354, the HMGN-dScCas-FokI-HMGB1, that in some embodiments may comprise the amino acid sequence as denoted by SEQ ID NO. 355, the HMGN-dScCas-FokI-HMGB3, that in some embodiments may comprise the amino acid sequence as denoted by SEQ ID NO. 356, the HMGN-dScCas-FokI-HMGB4, that in some embodiments may comprise the amino acid sequence as denoted by SEQ ID NO. 357, the dScCas-FokI-HMGB1, that in some embodiments may comprise the amino acid sequence as denoted by SEQ ID NO. 320, the dScCas-FokI-HMGB3, that in some embodiments may comprise the amino acid sequence as denoted by SEQ ID NO. 321 and the dScCas-FokI-HMGB4, that in some embodiments may comprise the amino acid sequence as denoted by SEQ ID NO. 322.

[0219] Still further, in some embodiments, the nucleic acid guided genome modifier chimeric protein provided by the invention may comprise as the PAM-free or reduced Cas protein, the Ancestral dCas9 protein, non-limiting example for such chimera, using FokI as the effector/modifier component may be the Ancestral dCas9-FokI, that in some embodiments comprise the amino acid sequence as denoted by SEQ ID NO. 284.

[0220] In some embodiments, the nucleic acid guided genome modifier chimeric protein provided by the invention may comprise as the PAM-free or reduced Cas protein, at least one of the dCasFl-Fok protein, dCasF2-Fok protein and the dCasF3-Fok protein. In some specific embodiments, the PAM-free or reduced chimeras of the invention may be a fusion protein between a nuclease-deficient CasF-2 and FokI, designed by dCasF2-Fok. In some embodiments, dCasF2-Fok chimera of the invention may comprise the dCasF2 amino acid sequence as denoted by SEQ ID NO 361.

[0221] In some further embodiments, the dCasF2 of the dCasF2-Fok fusion protein may have all or part of its RuvC nuclease domain deleted. In certain embodiment, the RuvC domain includes dCasF-2 residues 389-410, residues 601-612, and residues 689-706 of the dCasF2 sequence as denoted by SEQ ID NO. 361. In some embodiments, the RuvC domain residues may be replaced by short linkers (Gly-Gly-Ser-Gly, as denoted by SEQ ID NO. 399). In some particular embodiments, the fusion deletion variants of dCasF2-Fok may comprise dCasF2-Fok with a deletion of residues 389-410 (designated herein as dell). In some specific embodiments, the dell chimera may comprise the amino acid sequence as denoted by SEQ ID NO: 362. In yet some further embodiments, the fusion deletion variants of dCasF2-Fok may comprise dCasF2-Fok with a deletion of residues 601-612 (designated herein as de12). In some specific embodiments, the dell chimera may comprise the amino acid sequence as denoted by SEQ ID NO: 364.

[0222] In yet some further embodiments, the fusion deletion variants of dCasF2-Fok may comprise dCasF2-Fok with a deletion of residues 689-706 (designated herein as de13). In some specific embodiments, the dell chimera may comprise the amino acid sequence as denoted by SEQ ID NO: 365. Still further, in some embodiments, the present disclosure provides dCasF2-FokI chimeras that comprise either an N′-terminal FokI (SEQ ID NO: 363), or a C′-terminal Fold (SEQ ID NO. 366).

[0223] As indicated above, the effector/modifier component of the nucleic acid guided genome modifier or effector chimeric protein, complex or conjugate of the invention may perform any functional or physical modification on a target nucleic acid sequence. Physical modification as used herein includes cleavage, addition, deletion, insertion, editing functions (e.g., substitutions, mutations, deletions, insertions), addition of a chemical group, labeling, and the like. Functional modifications include gene repression or activation.

[0224] Repression or activation is achieved when the PAM-reduced or abolished Cas protein of the invention or any chimeric effector or modifier thereof, that comprise at least one transcription activator or repressor as the modifier/effector component, is guided to the target (e.g., by the target recognition element, discussed herein after), for example, a promoter region of the desired gene or any other control or regulatory element. A non-limiting example for repressor useful in the invention as the effector/modifier component, may be the Krüppel associated box (KRAB) domain, which enhances repression of the targets (Gilbert et al., Cell 154:442-451 (2013)). Thus, in some embodiments, the guided effector/modifier-chimeric protein or conjugate of the invention may comprise the KRAB—MeCP2 fusion protein.

[0225] Still further, activation of a target sequence is achieved when a transcriptional activator is used as the effector/modifier component in the chimeric protein or conjugate of the invention. A non-limiting example for such activator may be the Herpes simplex virus protein vmw65, also known as VP16 (Gilbert et al., Cell 154:442-451 (2013)).

[0226] In some further embodiments, the nucleic acid guided genome modifier chimeric protein of the invention may further comprise additional elements, for example, at least one cellular localization domain such as Nuclear localization signal (NLS), at least one Mitochondrial leader sequence (MLS), for example, at least one Chloroplast leader sequence; and/or any sequences designed to transport or lead or localize a protein to a nucleic acid containing organelle, a cellular compartment or any subdivision of a cell.

[0227] According to some embodiments, a “cellular localization domain” which can localize the nucleic acid guided genome modifier chimeric protein of the invention or a system comprising the modifier/effector chimeric protein and at least one target recognition element, or any complex thereof, to a specific cellular or sub cellular localization in a living cell, may optionally be part of the modifier/effector component of the nucleic acid guided genome modifier chimeric protein of the invention. The cellular localization domain may be constructed by fusing the amino-acid sequence of one of these components to amino-acids incorporating a domain comprising a Nuclear localization signal (NLS); a Mitochondrial leader sequence (MLS); a Chloroplast leader sequence; and/or any sequences designed to transport or lead or localize a protein to a nucleic acid containing organelle, a cellular compartment or any subdivision of a cell. In some exemplary embodiments, the organism is eukaryotic and the cellular localization domain comprises a nuclear localization domain (NLS) which allows the protein access to the nucleus and the genomic DNA within. Still further, in some embodiment, the at least two components of the nucleic acid guided genome modifier chimeric proteins of the invention, specifically, the PAM-reduced or abolished Cas protein and the effector/modifier component may be fused together or alternatively, may be linked to form the chimeric protein or conjugate by at least one linker. In yet some further alternative or additional embodiments, at least one linker in accordance with the present disclosure may replace at least one fragment or domain of the Cas protein used for the nucleic acid guided genome modifier chimeric proteins of the present disclosure, for example, replacement of the HNH domain by the linkers disclosed herein Example 3, specifically in nucleic acid guided genome modifier chimeric proteins that comprise the amino acid sequence as denoted by any one of SEQ ID NO. 342 344, 349 350 and 351. In some embodiments, the linker may comprise any compound bridging or connecting at least one amino acid residue of each component of the nucleic acid guided genome modifier chimeric proteins of the present disclosure. In some further embodiments, such linker is any inorganic or organic molecule, any small molecule, any peptide (L- as well as D-aa residues), or any combinations thereof. Still further, in some embodiments, the term “linker” in the context of the invention concerns an amino acid sequence of about 1 to about 20 or more amino acid residues positioned between, and connecting the at least two components of the nucleic acid guided genome modifier chimeric proteins of the invention. It should be appreciated that the linker may be positioned in the central region of at least one of the components of the nucleic acid guided genome modifier chimeric proteins of the invention and/or in at least one of their termini, namely at the C-terminus and/or at the N-terminus thereof. For example, a linker in accordance with the invention may be of 1, 2, 3, 4, 5, 6, 7, 8, 9, 10, 11, 12, 13, 14, 15, 16, 17, 18, 19 or 20 or more amino acid residues long. In some embodiments the linker according to the present invention encompasses 1-20, 1-19, 1-18, 1-17, 1-16, 1-15, 1-14, 1-13, 1-12, 1-11, 1-10, 1-9, 1-8, 1-7, 1-6, 1-5, 1-4, 1-3 or 1-2 or 1 amino acid residue/s. In other embodiments the linker encompasses 1, 2, 3, 4, 5, 6, 7, 8, 9, 10, 11, 12, 13, 14, 15, 16, 17, 18, 19, 20 or more amino acid residues. In some embodiments, the linker used in the present invention referred to herein as “short linker/s”, may comprise between about 1 to 5 amino acid residues, specifically, 1, 2, 3, 4, or 5 amino acid residues. In yet some further alternative embodiments, a linker used in the nucleic acid guided genome modifier chimeric proteins disclosed herein may be referred to herein as “long linker”, and may comprise about 5 to 20 or more amino acid residues, specifically, 5, 6, 7, 8, 9, 10, 11, 12, 13, 14, 15, 16, 17, 18, 19, 20. Specific embodiments refer to a linker composed of 12 amino acid residues. Particular and non-limiting embodiments for such linkers may include the linkers that comprise the amino acid sequences as denoted by any one of SEQ ID NO. 206, 207 (long), 306 (long), 208 (short) In yet some further embodiments, the linkers used by the nucleic acid guided genome modifier chimeric proteins of the present disclosure may comprise particular amino acid residues having a desired property, for example, positively charged amino acid residues, negatively charged amino acid residues, aromatic residues, and the like. In some embodiments, the linker used in the present disclosure may be a positively charged linker that comprise at least one Lys and/or Arg residues. Particular and non-limiting embodiments for such linker may include the linkers that comprise the amino acid sequences as denoted by any one of SEQ ID NO. 307 and 481, or alternatively the uncharged linker of SEQ ID NO. 209. Still further, the linkers used by the present disclosure may be derived from various polypeptides, for example, the H-NS nucleoid-associated protein. Non-limiting example for such linker may a linker comprising the amino acid sequence as dented by SEQ ID NO. 485. In some embodiments, the connection between the at least one linker and each of the components of the nucleic acid guided genome modifier chimeric proteins of the invention, may be formed by any means, such as covalent peptide bonds, disulfide bonds, chemical crosslinks, etc., or non-covalent associations, such as hydrogen bonding, van der Waal's contacts, electrostatic salt bridges, etc. In some embodiments, the linker is covalently linked or joined to the amino acid residues in its vicinity.

[0228] The invention provides nucleic acid guided genome modifier chimeric protein composed of two components as discussed above, the PAM-reduced or abolished Cas protein and the effector/modifier component. Non-limiting examples for such effector/modifier chimeras are disclosed by the invention, as specified above. However, it must be understood that the invention further encompasses any variant or any derivative of each of the chimeras provided herein, specifically, any variant, fragments, peptides or derivative of any of the chimeras disclosed by the amino acid sequences as denoted by any one of SEQ ID NO. 2, 14, 15, 16, 17, 24-44, 45-48, 56, 210-213, 271-281, 284 and 288-290, 314-318, 320-323, 330-357, 362-366, and 375-396, 406, 407, 426-438, 440-480, 487-492. More particular embodiments refer to the chimeras disclosed by the amino acid sequences as denoted by any one of SEQ ID NO. 2, 375, 444, 448, 467, 476, 478, 479 and 480, or any variants and derivatives thereof.

[0229] In some further embodiments, the nucleic acid guided genome modifier or effector provided by the invention may be divided into at least two polypeptides (or sequences encoding them) that can be reconstituted using inteins. Thus, in some embodiments, a fragment of the chimeras of the invention may encompass any N′-terminal and/or C′-terminal fragment or part of any of the chimeras disclosed in the present disclosure. In some embodiments, these fragments are attached or connected to an intein. As used herein, an intein is a segment of a protein that is able to excise itself and join the remaining portions (the exteins) with a peptide bond during protein splicing. Inteins have also been called protein introns, by analogy with (RNA) introns. They are intervening protein domains that can undergo a posttranslational autoprocessing termed protein splicing.

[0230] In some embodiments, the intein suitable for the invention may the N-terminal half of the DnaE intein from Nostoc punctiforme, and/or the C-terminal half of the DnaE intein from Nostoc punctiforme.

[0231] In some specific embodiments, the nucleic acid guided genome modifier or effector provided by the invention, specifically, the dScCas-FokI may be divided into at least two polypeptides (N′ and C′). In yet some further specific embodiments, these dScCas-FokI fragments, may comprise amino acid sequences as denoted by SEQ ID NO: 352 and 353.

[0232] It should be noted that “Amino acid sequence” or “peptide sequence” is the order in which amino acid residues connected by peptide bonds, lie in the chain in peptides and proteins. The sequence is generally reported from the N-terminal end containing free amino group to the C-terminal end containing amide Amino acid sequence is often called peptide, protein sequence if it represents the primary structure of a protein, however one must discern between the terms “Amino acid sequence” or “peptide sequence” and “protein”, since a protein is defined as an amino acid sequence folded into a specific three-dimensional configuration and that in some embodiments may undergo post-translational modifications, such as phosphorylation, acetylation, glycosylation, manosylation, amidation, carboxylation, sulfhydryl bond formation, cleavage and the like.

[0233] By “fragments or peptides” it is meant a fraction of the protein of the invention. A “fragment” of a molecule, such as any of the amino acid sequences of the present invention, is meant to refer to any amino acid subset. This may also include “variants” or “derivatives” thereof. A “peptide” is meant to refer to a particular amino acid subset having a functional, structural activity or function displayed by the protein disclosed by the invention.

[0234] It should be appreciated that the invention encompasses any variant or derivative of the CRISPR-Cas protein or chimeric protein of the invention and any polypeptides that are substantially identical or homologue. The term “derivative” is used to define amino acid sequences (polypeptide), with any insertions, deletions, substitutions and modifications to the amino acid sequences (polypeptide) that either do not alter the activity of the original polypeptides or alter it purposefully. In this connection, a derivative or fragment of the variant of the invention may be any derivative or fragment of the variant and/or mutated molecule, specifically as denoted by SEQ ID NO. 2, 10, 14, 15, 16, 17, 24-48, 56, 210-213, 256-281, 284,288-290, 308-318, 320-323, 330-366, and 375-396, 406, 407 and 426-480, 487-492, that do not reduce or alter the activity of the variant of the invention.

[0235] By the term “derivative” it is also referred to homologues, variants and analogues thereof. Proteins orthologs or homologues having a sequence homology or identity to the proteins of interest in accordance with the invention, specifically that may share at least 50%, at least 60% and specifically 65%, 70%, 75%, 80%, 85%, 90%, 91%, 92%, 93%, 94%, 95%, 96%, 97%, 98%, 99%, 100% , specifically as compared to the entire sequence of the proteins of interest in accordance with the invention, for example, any of the proteins that comprise the amino acid sequence as denoted by SEQ ID NO. 2, 10, 14, 15, 16, 17, 24-48, 56, 210-213, 256-281, 284,288-290, 308-318, 320-323, 330-366, and 375-396, 406, 407 and 426-480. Specifically, homologs that comprise or consists of an amino acid sequence that is identical in at least 50%, at least 60% and specifically 65%, 70%, 75%, 80%, 85%, 90%, 91%, 92%, 93%, 94%, 95%, 96%, 97%, 98%, 99%, or higher to SEQ ID NO. 2, 10, 14, 15, 16, 17, 24-48, 56, 210-213, 256-281, 284, 288-290, 314-318, 320-323, 330-366, and 375-396, 406, 407 and 426-480, 487-492.

[0236] In some embodiments, derivatives refer to polypeptides, which differ from the polypeptides specifically defined in the present invention by insertions, deletions or substitutions of amino acid residues. It should be appreciated that by the terms “insertion/s”, “deletion/s” or “substitution/s”, as well as “substituted,” “deleted”, “inserted”, as used herein it is meant any addition, deletion or replacement, respectively, of amino acid residues to the polypeptides disclosed by the invention, of between 1 to 50 amino acid residues, between 20 to 1 amino acid residues, and specifically, between 1 to 10 amino acid residues. More particularly, insertion/s, deletion/s or substitution/s may be of any one of 1, 2, 3, 4, 5, 6, 7, 8, 9, or 10 amino acids. It should be noted that the insertion/s, deletion/s or substitution/s encompassed by the invention may occur in any position of the modified peptide, as well as in any of the N′ or C′ termini thereof.

[0237] With respect to amino acid sequences, one of skill will recognize that individual substitutions, deletions or additions to a nucleic acid, peptide, polypeptide, or protein sequence which alters, adds or deletes a single amino acid or a small percentage of amino acids in the encoded sequence is a “conservatively modified variant” where the alteration results in the substitution of an amino acid with a chemically similar amino acid. Conservative substitution tables providing functionally similar amino acids are well known in the art. Such conservatively modified variants are in addition to and do not exclude polymorphic variants, interspecies homologues, and alleles of the invention.

[0238] For example, substitutions may be made wherein an aliphatic amino acid (G, A, I, L, or V) is substituted with another member of the group, or substitution such as the substitution of one polar residue for another, such as arginine for lysine, glutamic for aspartic acid, or glutamine for asparagine. Each of the following eight groups contains other exemplary amino acids that are conservative substitutions for one another:

[0239] 1) Alanine (A), Glycine (G);

[0240] 2) Aspartic acid (D), Glutamic acid (E);

[0241] 3) Asparagine (N), Glutamine (Q);

[0242] 4) Arginine (R), Lysine (K);

[0243] 5) Isoleucine (I), Leucine (L), Methionine (M), Valine (V);

[0244] 6) Phenylalanine (F), Tyrosine (Y), Tryptophan (W);

[0245] 7) Serine (S), Threonine (T); and

[0246] 8) Cysteine (C), Methionine (M).

[0247] More specifically, amino acid “substitutions” are the result of replacing one amino acid with another amino acid having similar structural and/or chemical properties, i.e., conservative amino acid replacements Amino acid substitutions may be made on the basis of similarity in polarity, charge, solubility, hydrophobicity, hydrophilicity, and/or the amphipathic nature of the residues involved. For example, nonpolar “hydrophobic” amino acids are selected from the group consisting of Valine (V), Isoleucine (I), Leucine (L), Methionine (M), Phenylalanine (F), Tryptophan (W), Cysteine (C), Alanine (A), Tyrosine (Y), Histidine (H), Threonine (T), Serine (S), Proline (P), Glycine (G), Arginine (R) and Lysine (K); “polar” amino acids are selected from the group consisting of Arginine (R), Lysine (K), Aspartic acid (D), Glutamic acid (E), Asparagine (N), Glutamine (Q); “positively charged” amino acids are selected form the group consisting of Arginine (R), Lysine (K) and Histidine (H) and wherein “acidic” amino acids are selected from the group consisting of Aspartic acid (D), Asparagine (N), Glutamic acid (E) and Glutamine (Q). Variants of the polypeptides of the invention may have at least 80% sequence similarity or identity, often at least 85% sequence similarity or identity, 90% sequence similarity or identity, or at least 95%, 96%, 97%, 98%, or 99% sequence similarity or identity at the amino acid level, with the protein of interest, such as the various polypeptides of the invention.

[0248] Still further, it should be understood that the nucleic acid modifier/effector component used for the nucleic acid guided genome modifier chimeric protein of the invention, may be either a protein-based component (in a chimeric or fusion protein as disclosed herein above), or in some alternative embodiments, a nucleic-acid based modifier. In some further specific embodiments, the nucleic acid modifier component of the chimeric protein of the invention may be a modifier based on at least one nucleic acid molecule having a catalytic activity, for example, a Ribozyme or DNAzyme, or any catalytic nucleic acid molecule or DNA machine (e.g., DNA tweezer), that may physically or functionally modify a target nucleic acid sequence.

[0249] In yet another aspect, the invention provides a nucleic acid molecule comprising a nucleic acid sequence encoding at least one Cas protein or any Cas protein derived domain, having reduced or abolished PAM constraint or any fragment, variant, mutant, fusion protein, complex or conjugate thereof. It should be noted that according to optional embodiments, at least one of the PBD and/or the PAM recognition motif, and/or the HNH-nuclease domain of the Cas protein, any fragment of the PBD, and/or of the PAM recognition motif, and/or of the HNH-nuclease domain, and at least one amino acid residue adjacent to the PBD, and/or to the PAM recognition motif, and/or to the HNH-nuclease domain, is deleted, substituted, mutated or replaced.

[0250] In more specific embodiments, the nucleic acid molecule of the invention may encode any of the CRISPR-Cas protein described herein, specifically, any of the Cas proteins having reduced or abolished PAM constraint or restriction, in accordance with the invention. In yet some further embodiments, the nucleic acid sequence of the invention may encode any of the nucleic acid guided genome modifier/effector chimeric protein, complex or conjugate described by the invention. Non-limiting examples for such chimeras may include, but are not limited to any one of the chimeras that comprise the amino acid sequence as denoted by any one of 2, 14, 15, 16, 17, 24-44, 45-48, 56, 210-213, 271-281, 284 and 288-290, 314-318, 320-323, 330-357, 362-366, and 375-396, 406, 407, 426-438, 440-480, 487-492. More particular embodiments refer to the chimeras disclosed by the amino acid sequences as denoted by any one of SEQ ID NO. 2, 375, 444, 448, 467, 476, 478, 479 and 480, or any variants and derivatives thereof. Still further, it should be understood that the invention further encompasses any nucleic acid sequence encoding any of the chimeras of the invention or any fragment, peptide variant or derivatives thereof, or any optimized version thereof. A non-limiting example for sequence encoding the dCas9-FokI chimeras optimized for plants, may refer to the nucleic acid sequence as denoted by SEQ ID NO. 58.

[0251] The term “nucleic acid”, “nucleic acid sequence”, or “polynucleotide” and “nucleic acid molecule” refers to polymers of nucleotides, and includes but is not limited to deoxyribonucleic acid (DNA), ribonucleic acid (RNA), DNA/RNA hybrids including polynucleotide chains of regularly and/or irregularly alternating deoxyribosyl moieties and ribosyl moieties (i.e., wherein alternate nucleotide units have an ——OH, then and ——H, then an ——OH, then an ——H, and so on at the 2′ position of a sugar moiety), and modifications of these kinds of polynucleotides, wherein the attachment of various entities or moieties to the nucleotide units at any position are included. The terms should also be understood to include, as equivalents, analogs of either RNA or DNA made from nucleotide analogs, and, as applicable to the embodiment being described, single-stranded (such as sense or antisense) and double-stranded polynucleotides. Preparation of nucleic acids is well known in the art.

[0252] It should be noted that the nucleic acid molecules (or polynucleotides) according to the invention can be produced synthetically, or by recombinant DNA technology. Methods for producing nucleic acid molecules are well known in the art.

[0253] The nucleic acid molecule according to the invention may be of a variable nucleotide length. For example, in some embodiments, the nucleic acid molecule according to the invention comprises 1-100 nucleotides, e.g., about 10, 20, 30, 40, 50, 60, 70, 80, 90 or 100 nucleotides. In other embodiments the nucleic acid molecule according to the invention comprises 100-1,000 nucleotides, e.g., about 100, 200, 300, 400, 500, 600, 700, 800, 900 or 1000 nucleotides. In further embodiments the nucleic acid molecule according to the invention comprises 1,000-10,000 nucleotides, e.g., about 1,000, 2,000, 3,000, 4,000, 5,000, 6,000, 7,000, 8,000, 9,000 or 10,000 nucleotides. In yet further embodiments the nucleic acid molecule according to the invention comprises more than 10,000 nucleotides, for example, 20,000, 30,000, 40,000, 50,000, 60,000, 70,000, 80,000, 90,000 or 100,000 nucleotides.

[0254] The invention further encompasses in some embodiments thereof at least one nucleic acid cassette comprising the nucleic acid sequence of the invention, or any vector or vehicle thereof. More specifically, the nucleic acid molecules provided by the invention may be comprised in some embodiments, within nucleic acid cassettes. The term “nucleic acid cassette” refers to a polynucleotide sequence comprising at least one regulatory sequence operably linked to a sequence encoding a nucleic acid sequence of interest. All elements comprised within the cassette of the invention are operably linked together. The term “operably linked”, as used in reference to a regulatory sequence and a structural nucleotide sequence, means that the nucleic acid sequences are linked in a manner that enables regulated expression of the linked structural nucleotide sequence.

[0255] Still further, the nucleic acid molecules of the invention or any cassettes thereof may be comprised within vector/s. Vector/s, as used herein, are nucleic acid molecules of particular sequence that can be introduced into a host cell, thereby producing a transformed host cell or be transiently expressed in the cell. A vector may include nucleic acid sequences that permit it to replicate in a host cell, such as an origin of replication. A vector may also include one or more selectable marker genes and other genetic elements known in the art, including promoter elements that direct nucleic acid expression. Many vectors, e.g. plasmids, cosmids, minicircles, phage, viruses, (as detailed below) useful for transferring nucleic acids into target cells may be applicable in the present invention. The vectors comprising the nucleic acid(s) may be maintained episomally, e.g. as plasmids, minicircle DNAs, viruses such cytomegalovirus, adenovirus, or they may be integrated into the target cell genome, through homologous recombination or random integration, e.g. retrovirus-derived vectors such as AAV, MMLV, HIV-1, ALV, etc.

[0256] As indicated above, in some embodiments, viral vectors may be applicable in the present invention. The term “viral vector” refers to a replication competent or replication-deficient viral particle which are capable of transferring nucleic acid molecules into a host.

[0257] In some embodiments such viral vectors may be used for transient expression of the components of the invention in the cell and may or may not be present in the cells ultimately delivered to the patient.

[0258] The term “virus” refers to any of the obligate intracellular parasites having no protein-synthesizing or energy-generating mechanism. The viral genome may be RNA or DNA contained with a coated structure of protein of a lipid membrane. Examples of viruses useful in the practice of the present invention include baculoviridiae, parvoviridiae, picornoviridiae, herepesviridiae, poxviridiae, adenoviridiae, picotmaviridiae. The term recombinant virus includes chimeric (or even multimeric) viruses, i.e. vectors constructed using complementary coding sequences from more than one viral subtype. In yet some particular embodiments, such viral vector may be any one of recombinant adeno associated vectors (rAAV), single stranded AAV (ssAAV), self-complementary rAAV (scAAV), Simian vacuolating virus 40 (SV40) vector, Adenovirus vector, helper-dependent Adenoviral vector, retroviral vector and lentiviral vector.

[0259] More specifically, in some embodiments, the nucleic acid molecules suitable to methods of the invention may be comprised within an Adeno-associated virus (AAV). The term “adenovirus” is synonymous with the term “adenoviral vector”. AAV is a single-stranded DNA virus with a small (˜20 nm) protein capsule that belongs to the family of parvoviridae, and specifically refers to viruses of the genus adenoviridiae. The term adenoviridiae refers collectively to animal adenoviruses of the genus mastadenovirus including but not limited to human, bovine, ovine, equine, canine, porcine, murine and simian adenovirus subgenera. In particular, human adenoviruses includes the A-F subgenera as well as the individual serotypes thereof the individual serotypes and A-F subgenera including but not limited to human adenovirus types 1, 2, 3, 4, 4a, 5, 6, 7, 8, 9, 10, 11 (Ad11A and Ad IIP), 12, 13, 14, 15, 16, 17, 18, 19, 19a, 20, 21, 22, 23, 24, 25, 26, 27, 28, 29, 30, 31, 32, 33, 34, 34a, 35, 35p, 36, 37, 38, 39, 40, 41, 42, 43, 44, 45, 46, 47, 48, and 91.

[0260] Due to its inability to replicate in the absence of helpervirus coinfections (typically Adenovirus or Herpesvirus infections) AAV is often referred to as dependovirus. AAV infections produce only mild immune responses and are considered to be nonpathogenic, a fact that is also reflected by lowered biosafety level requirements for the work with recombinant AAVs (rAAV) compared to other popular viral vector systems. Due to its low immunogenicity and the absence of cytotoxic responses AAV-based expression systems offer the possibility to express genes of interest for months in quiescent cells.

[0261] Production systems for rAAV vectors typically consist of a DNA-based vector containing a transgene expression cassette, which is flanked by inverted terminal repeats (payload). Construct sizes are limited to approximately 4.7-5.0 kb, which corresponds to the length of the wild-type AAV genome. In some embodiments it would thus be advantageous to have a payload smaller than this upper limit. rAAVs are produced in cell lines. The expression vector is co-transfected with a helper plasmid that mediates expression of the AAV rep genes which are important for virus replication and cap genes that encode the proteins forming the capsid. Recombinant adeno-associated viral vectors can transduce dividing and non-dividing cells, and different rAAV serotypes may transduce diverse cell types. These single-stranded DNA viral vectors have high transduction rates and have a unique property of stimulating endogenous Homologous Recombination without causing double strand DNA breaks in the host genome.

[0262] It should be appreciated that many intermediate steps of the wild-type infection cycle of AAV depend on specific interactions of the capsid proteins with the infected cell. These interactions are crucial determinants of efficient transduction and expression of genes of interest when rAAV is used as gene delivery tool. Indeed, significant differences in transduction efficacy of various serotypes for particular tissues and cell types have been described. Thus, in some embodiments AAV serotype 6 may be suitable for the methods of the invention. In yet some further embodiments, AAV serotype 8 may be suitable for the methods, systems, and the nucleic acid guided genome modifier chimeric protein of the invention.

[0263] It is believed that a rate-limiting step for the AAV-mediated expression of transgenes is the formation of double-stranded DNA. Recent reports demonstrated the usage of rAAV constructs with a self-complementing structure (scAAV) in which the two halves of the single-stranded AAV genome can form an intra-molecular double-strand. This approach reduces the effective genome size usable for gene delivery to about 2.3 kB but leads to significantly shortened onsets of expression in comparison with conventional single-stranded AAV expression constructs (ssAAV). Thus, in some embodiments, ssAAV may be applicable as a viral vector by the methods of the invention.

[0264] In yet some further embodiments, HDAd vectors may be suitable for the methods, systems, and the nucleic acid guided genome modifier chimeric protein of the invention. The Helper-Dependent Adenoviral (HDAd) vectors HDAds have innovative features including the complete absence of viral coding sequences and the ability to mediate high level transgene expression with negligible chronic toxicity. HDAds are constructed by removing all viral sequences from the adenoviral vector genome except the packaging sequence and inverted terminal repeats, thereby eliminating the issue of residual viral gene expression associated with early generation adenoviral vectors. HDAds can mediate high efficiency transduction, do not integrate in the host genome, and have a large cloning capacity of up to 37 kb, which allows for the delivery of multiple transgenes or entire genomic loci, or large cis-acting elements to enhance or regulate tissue-specific transgene expression. One of the most attractive features of HDAd vectors is the long-term expression of the transgene.

[0265] Still further, in some embodiments, SV40 may be used as a suitable vector by the methods, systems, and the nucleic acid guided genome modifier chimeric protein of the invention. SV40 vectors (SV40) are vectors originating from modifications brought to Simian virus-40 an icosahedral papovavirus. Recombinant SV40 vectors are good candidates for gene transfer, as they display some unique features: SV40 is a well-known virus, non-replicative vectors are easy-to-make, and can be produced in titers of 10(12) IU/ml. They also efficiently transduce both resting and dividing cells, deliver persistent transgene expression to a wide range of cell types, and are non-immunogenic. Present disadvantages of rSV40 vectors for gene therapy are a small cloning capacity and the possible risks related to random integration of the viral genome into the host genome.

[0266] In certain embodiments, an appropriate vector that may be used by the invention may be a retroviral vector. A retroviral vector consists of proviral sequences that can accommodate the gene of interest, to allow incorporation of both into the target cells. The vector may also contain viral and cellular gene promoters, to enhance expression of the gene of interest in the target cells. Retroviral vectors stably integrate into the dividing target cell genome so that the introduced gene is passed on and expressed in all daughter cells. They contain a reverse transcriptase that allows integration into the host genome.

[0267] In yet some alternative embodiments, lentiviral vectors may be used in the present invention. Lentiviral vectors are derived from lentiviruses which are a subclass of Retroviruses. Commonly used retroviral vectors are “defective”, i.e. unable to produce viral proteins required for productive infection. Rather, replication of the vector requires growth in a packaging cell line. To generate viral particles comprising the nucleic acids sequence of interest, the retroviral nucleic acids comprising the nucleic acid are packaged into viral capsids by a packaging cell line. Different packaging cell lines provide a different envelope protein (ecotropic, amphotropic or xenotropic) to be incorporated into the capsid, this envelope protein determining the specificity of the viral particle for the cells (ecotropic for murine and rat; amphotropic for most mammalian cell types including human, dog and mouse; and xenotropic for most mammalian cell types except murine cells). The appropriate packaging cell line may be used to ensure that the cells are targeted by the packaged viral particles. Methods of introducing the retroviral vectors comprising the nucleic acid molecules of the invention that contains the nucleic acids sequence of interest into packaging cell lines and of collecting the viral particles that are generated by the packaging lines are well known in the art.

[0268] In some alternative embodiments, the vector may be a non-viral vector. More specifically, such vector may be in some embodiments any one of plasmid, minicircle and linear DNA, ssDNA (that are especially useful for donor integration at cleavage site) or RNA (useful to avoid long term expression and or integration) or a modified polynucleotide (mainly chemically protective modifications to protect RNA or DNA-RNA chimeras to enhance specificity and or stability). Nonviral vectors, in accordance with the invention, refer to all the physical and chemical systems except viral systems and generally include either chemical methods, such as cationic liposomes and polymers, or physical methods, such as gene gun, electroporation, particle bombardment, ultrasound utilization, and magnetofection. Efficiency of this system is sometimes less than viral systems in gene transduction, but their cost-effectiveness, availability, and more importantly reduced induction of immune system and no limitation in size of transgenic DNA compared with viral system have made them attractive also for gene delivery.

[0269] For example, physical methods applied for in vitro and in vivo gene delivery are based on making transient penetration in cell membrane by mechanical, electrical, ultrasonic, hydrodynamic, or laser-based energy so that DNA, RNA or RNP entrance into the targeted cells is facilitated. In more specific embodiments, the vector may be a naked DNA vector. More specifically, such vector may be for example, a plasmid, minicircle or linear DNA.

[0270] Naked DNA alone may facilitate transfer of a nucleic acid sequence (2-200 Kb or more) into skin, thymus, cardiac muscle, and especially skeletal muscle and liver cells when directly injected. It enables also long-term expression. Although naked DNA injection is a safe and simple method, its efficiency for gene delivery is quite low.

[0271] Minicircles are modified plasmid in which a bacterial origin of replication (ori) was removed, and therefore they cannot replicate in bacteria.

[0272] Linear DNA or DoggyboneTM are double-stranded, linear DNA construct that solely encodes an payload expression cassette, comprising antigen, promoter, polyA tail and telomeric ends.

[0273] It should be appreciated that all DNA vectors disclosed herein, may be also applicable for the methods, systems and compositions of the invention.

[0274] Still further, it must be appreciated that the invention further provides any vectors or vehicles that comprise any of the nucleic acid molecules disclosed by the invention, as well as any host cell expressing the nucleic acid molecules disclosed by the invention.

[0275] It should be understood that any of the viral vectors disclosed herein may be relevant to any of the nucleic acid molecules discussed in other aspects of the invention, specifically to nucleic acid molecules encoding the SCNA (gRNA), the Donor or the protein components as described by the invention.

[0276] As indicated above, vectors may be provided directly to the subject cells thereby being contacted with the cell/s. In other words, the cells are contacted with vectors comprising the nucleic acid molecules of the invention that comprise the nucleic acid sequence of interest such that the vectors are taken up by the cells. Methods for contacting cells with nucleic acid vectors that are plasmids, such as electroporation, calcium chloride transfection, and lipofection (e.g. using Lipofectamin), are well known in the art. DNA can be introduced as naked nucleic acid, as nucleic acid complexed with an agent such as a liposome, nanoparticles or poloxamer, or can be delivered by viruses (e.g., adenovirus, AAV).

[0277] A further aspect of the invention relates to a nucleic acid guided genome modifier/effector system.

[0278] In more specific embodiments, the system of the invention comprises the following components:

[0279] The first component (a), of the system of the invention may be at least one Cas protein or Cas protein derived domain, having reduced or abolished PAM constraint or any fragment, variant, mutant, fusion/chimeric protein, complex or conjugate thereof. Alternatively, the system of the invention may comprise at least one nucleic acid sequence encoding this Cas protein or any variant, mutant, fusion/chimeric protein, complex or conjugate thereof. It should be noted that at least one of: the PBD of the Cas protein of the system of the invention, any fragment of said PBD, and at least one amino acid residue adjacent to the PBD, is deleted or replaced.

[0280] The second component (b), of the system of the invention may be at least one target recognition element, or alternatively, any nucleic acid sequence encoding the target recognition element.

[0281] According to some embodiments, the system disclosed herein is modular and components thereof can self-assemble within a target cell either in vivo or in vitro, allowing the supply of one type of Cas protein having abolished or reduced PAM-restriction or constraint, or any fusion protein thereof with the modifier or effector component, at a time with one or a multiplicity of target recognition element/s concomitantly. Furthermore, in some embodiments, the Cas protein having abolished or reduced PAM-restriction or any fusion protein thereof can be delivered to a desired cell(s) and expressed in vivo, awaiting the delivery of any appropriate target recognition element/s at a later time. In some embodiments, the Cas protein having abolished or reduced PAM-restriction or any fusion protein, complex or conjugate thereof and the target recognition element/s may be delivered simultaneously, or essentially simultaneously. Thus, the combination of the Cas protein having abolished or reduced PAM-restriction or any fusion protein, complex or conjugate thereof and the target recognition element/s, preferably within the desired target cell, may accomplish the induction of specific genomic double strand breaks (DSBs), or any other desired nucleic acid modification, in vivo.

[0282] In some embodiments, the Cas protein of the system of the invention may be at least one of Cas9, CasX, Cas14a1, Cas14b5, CasF, ancestral Cas and Cas12a or any variant, mutant, fusion/chimeric protein, complex or conjugate thereof. In yet some further embodiments, the chimeric or fusion protein, complex or conjugate of such Cas protein of the system of the invention, may further comprise at least one nucleic acid modifier component.

[0283] In more specific embodiments, the Cas protein used as a component in the system of the invention, may be at least one of ScCas9, SpCas9, an ancestral Cas9, deltaproteobacteria CasX, Cas12a, CasF-1, CasF-2, CasF-3, Cas14a1, or Cas14b5. According to such embodiments, at least one PAM interacting Arginine residue of the PBD of such Cas protein may be deleted or replaced.

[0284] In more specific embodiments, the Cas used for the systems of the invention may be ScCas9. In some embodiments, the ScCas9 may comprise an amino acid sequence as denoted by SEQ ID NO. 258, with a replacement or deletion of at least one of: residues Thr1330 to Arg1342, residues Glu1228 to Tyr1343, residues Glu1108 to Asp1375, residues Ile367 to Ala376 and residues Lys1337 and Gln1338. As indicated herein before in connection with other aspects of the invention, the particular residues defining the PBD of the Cas protein of the invention, specifically, the ScCas, may start at least one, two, three or more residues N′ or C′ to the specified starting residue, and/or end at least one, two, three or more residues C′ or N to the specified end residue.

[0285] For example, in case of residues Thr1330 to Arg1342, the deleted or replaced sequence may comprise a sequence stating at any one of residues 1327, 1328, 1329, 1330, 1331, 1332 or 1333 of ScCas, and ends at any one of residues 1339, 1340, 1341, 1342, 1343, 1344 or 1345.

[0286] In yet some further specific embodiments, the PAM-reduced or abolished CRISPR-Cas protein of the invention may further comprise at least one NSBD. In yet some further embodiments, the NSBD may be added to said Cas (either to the N′ and/or C′ terminus thereof) and/or may replace at least one of the PAM binding domain, and/or the PAM recognition motif, and/or the HNH-nuclease domain, and/or at least one adjacent amino acid residue thereof.

[0287] More specifically, such NSBD may be at least one dsDBP binding domain or protein, and any variant and fragments thereof.

[0288] In some specific embodiments, the at least one dsDBP that replaces the PAM binding domain of the Cas protein used by the systems of the invention and/or at least one adjacent amino acid residues thereof, may be at least one of: at least one ZF, HTH, SH3 domain, Non-specific RVD from AvrBS3 protein family, CBD protein and StkC, domain or protein, and any variant and fragments thereof.

[0289] In more specific embodiments, the Cys₂His₂ of Testis zinc finger 3 (TZD) used herein may comprise the amino acid sequence as denoted by SEQ ID NO. 265. In yet some further embodiments, the Lac repressor (Lad) residues 1 to 46, that may be applicable in the present invention, may comprise the amino acid sequence as denoted by SEQ ID NO. 259. In certain embodiments, the SH3 domain comprising at least one of: residues 219 to 270 of HIV integrase protein, that may be applicable in the present invention, may comprise the amino acid sequence as denoted by SEQ ID NO. 260. Still further, in some embodiments, residues 1 to 64 of the Sso7D DNA-binding protein of Sulfolobus solfataricus, that may be applicable in the present invention, may comprise the amino acid sequence as denoted by SEQ ID NO. 261. In some embodiments, residues 1 to 64 of the Sto7D DNA-binding protein from Sulfolobus tokodaii, that may be applicable in the present invention, may comprise the amino acid sequence as denoted by SEQ ID NO. 262. In some further embodiments, StkC domain that comprise residues 232-305 of Arabidopsis MBD7 methyl-CpG-binding domain and may be applicable in the present invention, may comprise the amino acid sequence as denoted by SEQ ID NO. 263. In yet some further embodiments, CBD that comprises at least one High Mobility Group (HMG) protein, and may be applicable in the present invention, may comprise the amino acid sequence as denoted by SEQ ID NO. 264.

[0290] Still further, in some embodiments, the PAM binding domain of the Cas protein used by the systems of the invention and/or at least one adjacent amino acid residues is replaced by at least one NSBD that may be in some embodiments, at least one SSB.

[0291] In yet some further embodiments, the Cas protein used as a component in the system of the invention may be a Cas mutant or variant. In some specific embodiments, such mutant or variant may be a Cas protein having altered activity, stability, specificity, solubility, size or any other altered functional and/or structural property. In some embodiments, such Cas protein may be a Cas protein having reduced or abolished nucleolytic activity. In yet some further embodiments, such Cas protein may have a reduced size. More specifically, such mutant or variant further comprises at least one of: (a) at least one point mutation substituting aspartic acid residue at position 10 to alanine (D10A) and/or at least one point mutation substituting histidine residue 849 to alanine (H849A); the Cas protein may further or alternatively comprise (b) at least one deletion, substitution, mutation and/or replacement of at least one of: (i) at least one of the HNH-nuclease domain or any fragment thereof and/or at least one amino acid residue thereof; (ii) the REC2 domain or any fragments thereof and/or at least one amino acid residue thereof; (iii) the FLEX domain or any fragments thereof and/or at least one amino acid residue thereof; (iv) the RUVC domain or any fragments thereof and/or at least one amino acid residue thereof, and (v) any combinations of (i), (ii), (iii), and (iv); and (c) at least one mutation in at least one residue of at least one of (i) the HNH-nuclease domain or any fragment thereof; (ii) the REC2 domain or any fragments thereof; (iii) the FLEX domain, or any fragments thereof; (iv) the RUVC domain or any fragments thereof; and (v) and any combinations of (i), (ii), (iii), and (iv). Still further, in some embodiments, the PAM-reduced or abolished Cas protein of the invention may comprise a deletion in at least one of (i), (ii), (iii), and (iv) or any combinations thereof and additionally, at least one mutation in at least one amino acid residue comprised within the PBD of the ScCas9. Non-limiting embodiments for such mutations may comprise the QQ mutant that may comprise two Gln residues that substitute Arg residues 370 and 372 of the ScCas9 as denoted by SEQ ID NO. 258. In yet some further embodiments, the PAM abolished or reduced ScCas9 of the invention may comprise the AA mutant, that comprise two Ala residues that substitute Arg residues 370 and 372 of SEQ ID NO. 258. As shown by examples 2 and 3, the PAM abolished or reduced ScCas9 of the present disclosure may comprise Sc loop QQ or AA mutations, or alternatively, Sc loop depletion or replacement thereof with at least one dsDBP or SSB as discussed above, combined with deletion of HNH, and replacement of the RuvC and Rec domains with ancestral versions.

[0292] In yet some further embodiments, in case a chimeric or conjugated Cas protein is used by the systems of the invention, the Cas protein is a mutated Cas. Such Cas mutant is in some embodiments a defective CRISPR-Cas protein devoid of a nucleolytic activity.

[0293] It should be appreciated that in more specific embodiments, the chimeric protein or conjugate used for the systems of the invention may be any of the Chimeric proteins defined by the invention, specifically, in any of the aspects disclosed herein.

[0294] In some particular embodiments, the systems of the invention may use any of the nucleic acid guided genome modifier chimeric protein of the invention, specifically, any chimera comprising the amino acid sequence as denoted by any one of 2, 14, 15, 16, 17, 24-44, 45-48, 56, 210-213, 271-281, 284 and 288-290, 314-318, 320-323, 330-357, 362-366, and 375-396, 406, 407, 426-438, 440-480, 487-492, or any variants, fragments or derivatives thereof as specified by the invention herein before. More particular embodiments refer to the chimeras disclosed by the amino acid sequences as denoted by any one of SEQ ID NO. 2, 375, 444, 448, 467, 476, 478, 479 and 480, or any variants and derivatives thereof.

[0295] Still further, in some embodiments, the Cas protein or any variant, mutant, fusion protein, complex or conjugate thereof, used by the systems of the invention is capable of binding at least one target recognition element. In some specific embodiments, such at least one target recognition element may be at least one nucleic acid target recognition element. More specifically, at least one of: a single strand RNA molecule, a double strand RNA molecule, a single strand DNA, a double strand DNA, a modified DNA molecule, a modified RNA molecule, a LNA, a PNA and any hybrid or combinations thereof.

[0296] As used herein a “target recognition element” is a nucleic acid sequence (either RNA or DNA or a modified nucleic acid or a combination thereof) that will direct the nucleic acid-modifier/effector component (e.g., protein that directly or indirectly modify the target sequence) of the chimeric protein or conjugate of the invention.

[0297] More specifically, in some embodiments, the target recognition element of the invention, that is also referred to herein as a specificity conferring nucleic acid (SCNA), or as guide nucleic acids (e.g., guide RNA), may comprise at least one of: a single-strand DNA, a single strand RNA, a double strand RNA, a modified DNA, a modified RNA, a locked-nucleic acid (LNA) and a peptide-nucleic acid (PNA), any hybrids thereof, or any combinations thereof. In some embodiments, the target recognition element or SCNA of the invention comprises a specificity-defining sequence configured to specifically interact with the target nucleic acid. The interaction between the target recognition element, or SCNA and the target nucleic acid is through base pairing, selected from the group consisting of a full double helix base pairing, a partial double helix base pairing, a full triple helix base pairing, a partial triple helix base pairing, and D-loops, R-loops or branched forms, formed by said base pairing.

[0298] In additional embodiments, the target recognition element or SCNA may comprise a recognition region, configured to associate/bind/attach with a PAM reduced/free Cas protein of the invention or any chimera, complex or conjugate thereof, specifically, the nucleic acid guided genome modifier/effector chimeric protein, complex or conjugate of the invention. In some embodiments, the recognition region comprises a modification selected from the group consisting of 5′-end modification, 3 ′-end modification, and internal modification. The modification may be selected from, but not limited to nucleotide modification, Biotin, Fluorescein, Amine-linkers, oligo-peptides, Aminoallyl, a dye molecule, fluorophores, Digoxygenin, Acrydite, Adenylation, Azide, NHS-Ester, Cholesteryl-TEG, Alkynes, Photocleavable Biotin, Thiol, Dithiol, Modified bases, phosphate, 2-Aminopurine, Trimer-20, 2,6-Diaminopurine, 5-Bromo-deoxiUridine, DeoxiUridine, Inverted dT, dideoxi-nucleotides, 5-methyl deoxyCytidine, deoxylnosine, 5-nitroindole, 2-O-methyl RNA bases, Iso-dC, Iso-dG, Flourine modified bases and Phosphorothioate bonds, and proteins covalently bound by their interaction with the specific nucleotide sequences. The proteins covalently bound by their interaction with the specific nucleotide sequences are selected from Agrobacterium VirD2 protein, Picomavirus VPg, Topoisomerase, PhiX174 phage A protein, PhiX A* protein and any variants thereof.

[0299] In some embodiments, the association/binding/attachment between the modification on the target recognition element or SCNA and the PAM reduced/free Cas protein of the invention or any chimera, complex or conjugate thereof, results from a non-covalent interaction of a binding-pair selected from: Biotin-Avidin; Biotin-Streptavidin; Biotin-modified forms of Avidin; Protein-protein interactions; protein-nucleic acid interactions; ligand-receptor interactions; ligand-substrate interactions; antibody-antigen interactions; single chain antibody-antigen; antibody or single chain antibody-hapten interactions; hormone-hormone binding protein; receptor-agonist; receptor-receptor antagonist; anti-Fluorescein single-chain variable fragment antibody (anti-FAM ScFV)—Fluorescein; anti-DIG single-chain variable fragment (scFv) immunoglobin (DIG-ScFv)—Digoxigenin (DIG); IgG-protein A; enzyme-enzyme cofactor; enzyme-enzyme inhibitor; single-strand DNA-VirE2; StickyC—dsDNA; RISC—RNA; viral coat protein-nucleic acid and Agrobacterium VirD2-VirD2 binding protein; and any variants thereof.

[0300] In some embodiments, binding/association between the target recognition element, or SCNA and the PAM reduced/free Cas protein of the invention or any chimera, complex or conjugate thereof is covalently created in vivo. In some embodiments, the covalent association of the PAM reduced/free Cas protein of the invention or any chimera, complex or conjugate thereof and the target recognition element or SCNA results from a biological interaction of Agrobacterium VirD2-Right border sequence or any variants thereof, and is created in a bacterium comprising Agrobacterium.

[0301] In some embodiments, the recognition region comprises a nucleotide motif capable of interacting/attaching/binding with the PAM reduced/free Cas protein of the invention or any chimera, complex or conjugate thereof. In some embodiments, the interaction pair is selected from: Zinc finger protein-Zinc finger motif; restriction enzyme recognition domain-restriction enzyme recognition sequence; DNA binding domain of transcription factor-DNA motif; repressor-operator; Leucine zipper -promoter; Helix loop helix-E box domain; RNA binding motifs comprising Arginine-Rich Motif domains, αβ protein domains, RNA Recognition Motif (RRM) domains, MS2 coat protein-MS2 RNA binding hairpin, K-Homology Domains, Double Stranded RNA Binding Motifs, RNA-binding Zinc Fingers, and RNA-Targeting Enzymes-cognate specific RNA sequence; HIV-rev protein-Stem IIB of the HIV rev response element (RRE); Bovine immunodeficiency virus (BIV) Tat main binding domain-loop 1 of the BIV trans-acting response element (TAR) sequence; Phage lambda, phi21, and P22 Nproteins-The boxB loop hairpins in the N-utilization (nut) sites in their respective RNAs.

[0302] Still further, in case of a nucleic acid-modifier that is a protein such as a nuclease, the target recognition element may be a nucleic acid guide that targets the nuclease to a specific target position within a target nucleic acid sequence (e.g., SCNA, gRNA). The recognition of the target by the target recognition element is facilitated in some embodiments by base-pairing interactions. These target recognition elements are specifically relevant in case of guided nucleases. In some embodiments, for nucleases displaying a nucleolytic activity, directing the nuclease to a specific predetermined target site in the target nucleic acid may result in cleaving the phosphodiester bonds between monomers of nucleic acids (e.g., DNA and/or RNA) that may lead in some embodiments to specific modifications thereof, such as mutations, deletions, frame-shifts, insertion of a Donor nucleic acid, or replacement of the target or a portion thereof with an alternative Donor nucleic acid.

[0303] In yet some alternative embodiments, where the modifier used performs a modulation other than nucleolytic activity, directing the modifier to the target site may result in targeted modulation (e.g., activation or repression, methylation or demethylation and the like) of the target nucleic acid sequence targeted by the target recognition element. It should be noted that a target recognition element may comprise between about 3 nucleotides to about 100 nucleotides, specifically, 3, 4, 5, 6, 7, 8, 9, 10,15, 20, 25, 30, 35, 40, 45, 50, 55, 60, 65, 70, 75, 80, 85, 90, 95 100 or more. More specifically between about 10 nucleotides to 70 nucleotides or more.

[0304] It should be understood that in some embodiments, for modifying the target nucleic acid sequence by the nucleic acid guided genome modifier chimeric/fusion protein complex or conjugate of the systems of the invention, at least two target recognition elements may be used to guide at least two PAM reduced or abolished Cas protein and fusion proteins thereof to a single target site within the target nucleic acid sequence. According to such embodiments, each of the respective target recognition elements (e.g., SCNAs or gRNAs), may be directed to a target sequence that is located at a distance of between about 5 to 50 nucleotides from the target sequence/s recognized by at least one other targeting recognition element/s. In some embodiments, the distance may be any one of 5, 6, 7, 8, 9, 10, 11, 12, 13, 14, 15, 16, 17, 18, 19, 20, 21, 22, 23, 24, 25, 26, 27, 28, 29, 30, 31, 32, 33, 34, 35, 36, 37, 38, 39, 40, 41, 42, 43, 44, 45, 46, 47, 48, 49, 50 or more. In some embodiments, the target recognition elements used in the systems of the invention may be designed for targeting target sequences that are located at a distance of about 10 to 30 nucleotides from each other, specifically, 10, 11, 12, 13, 14, 15, 16, 17, 18, 19, 20, 21, 22, 23, 24, 25, 26, 27, 28, 29, 30, nucleotides, more specifically, 15 nucleotides or more, or 27 nucleotides or more. In some embodiments, the target recognition elements used in the systems of the invention may be designed for targeting target sequences that are located at a distance of about 15 nucleotides.

[0305] In some embodiments, the target recognition element/s, disclosed herein, that are also referred to herein as the programming oligonucleotides or SCNAs, have an infinite repertoire of sequences, thus conceivably achieving extreme sequence specificity in high complexity genomes. Moreover, as many programming oligonucleotides can be supplied concomitantly with a single protein effector moiety, e.g., the PAM-reduced or abolished Cas protein of the invention or any nucleic acid guided genome modifier or effector chimeric protein, complex or conjugate thereof, it is possible to modify more than one target at the same time, providing additional advantages over methods known in the art. This can be useful, for example, for rapidly knocking out a multiplicity of genes, or for inserting several different traits in different locations, or for tagging several different locations with one donor nucleotide tag.

[0306] Designing and preparing synthetic target recognition element/s is relatively simple, rapid and relatively inexpensive. It is also possible, in some embodiments of this invention, to produce target recognition elements in-vivo, circumventing the necessity to deliver chemically synthesized target recognition elements to a cell. Furthermore, these elements can be designed to base pair to almost any desired target sequence, and thus, can direct the molecular complex to almost any target sequence. Moreover, several sequences may be targeted in the same cell concomitantly. For example, in editing functions which require more than one cleavage site, such as deletion or replacement of specific stretches of nucleic acid, by simply providing different target recognition elements and one effector moiety, specifically, the Cas protein having abolished or reduced PAM-restriction or any fusion protein thereof, in accordance with the invention. The systems of the invention may comprise the nucleic acid guided effector/modifier and the at least one target recognition element, either in a mature form, for example, as a protein moiety and as a target recognition element (e.g., gRNA, split-gRNA), or as a Ribonucleoprotein (RNP). However, the invention further encompasses the option of a system comprising nucleic acid sequences encoding each of these components, specifically, nucleic acid sequence encoding the nucleic acid guided effector/modifier of the invention, and nucleic acid sequence encoding the at least one target recognition element. Thus, in some embodiments, the systems of the invention may comprise at least one nucleic acid sequence encoding said Cas protein or any variant, mutant, fusion/chimeric protein thereof and at least one nucleic acid sequence encoding at least one target recognition element, specifically, at least one gRNA. In some embodiments, the nucleic acid sequence encoding the Cas protein of the invention or any chimeric or fusion protein thereof, and the nucleic acid sequence encoding the target recognition element may be comprised in one or more nucleic acid cassette or any vector or vehicle.

[0307] In yet some further aspect thereof, the invention relates to at least one host cell, that is either genetically modified by, or that comprises at least one of:

[0308] (a), at least one Cas protein or any Cas derived domain having reduced or abolished PAM constraint or any fragment, variant, mutant, fusion/chimeric protein, complex or conjugate thereof, or alternatively, at least one nucleic acid sequence encoding the Cas protein or any variant, mutant, fusion/chimeric protein or conjugate thereof. It should be noted that in some optional embodiments, at least one of: the PBD and/or the PAM recognition motif, and/or the HNH-nuclease domain of the Cas protein, any fragment of the PBD, and/or of the PAM recognition motif, and/or of the HNH-nuclease domain, and at least one amino acid residue adjacent to the PBD, and/or to the PAM recognition motif, and/or to the HNH-nuclease domain, is deleted, substituted, mutated or replaced.

[0309] (b) at least one target recognition element or any nucleic acid sequence encoding the target recognition element;

[0310] (c) at least one nucleic acid cassette or any vector or vehicle comprising at least one of the nucleic acid sequence of (a), the nucleic acid sequence of (b) or the nucleic acid sequence of (a) and (b); and

[0311] (d) at least one system comprising (a) and (b).

[0312] In yet some further embodiments, the CRISPR-Cas protein comprised within the host cell of the invention may be any of the Cas proteins as defined by the invention. It should be noted that in some further embodiments, the invention provide host cells comprising any of the fusion/chimeric protein or conjugates of the Cas protein, specifically, the nucleic acid guided genome modifier chimeric protein, complex or conjugate as defined by the invention. In some specific embodiments, the host cell of the invention may comprise any of the nucleic acid guided effector/modifier disclosed by the invention, for example, any of the modifiers comprising the amino acid sequence as denoted by any one of SEQ ID NO. 2, 14, 15, 16, 17, 24-44, 45-48, 56, 210-213, 271-281, 284 and 288-290, 314-318, 320-323, 330-357, 362-366, and 375-396, 406, 407, 426-438, 440-480, 487-492. More particular embodiments refer to the chimeras disclosed by the amino acid sequences as denoted by any one of SEQ ID NO. 2, 375, 444, 448, 467, 476, 478, 479 and 480, or any variants and derivatives thereof.

[0313] In yet some further embodiments, the host cell of the invention may comprise any of the nucleic acid molecules defined by the invention. Still further, the host cell of the invention may comprise any of the systems disclosed by the invention, as specified herein.

[0314] In some further embodiments, the host cells of the invention may comprise at least one target recognition element that may be at least one of: a single strand RNA molecule, a double strand RNA molecule, a ssDNA, a dsDNA, a modified DNA molecule, a modified RNA molecule, a LNA, a PNA and any hybrid or combinations thereof.

[0315] The term “host cell” includes a cell into which a heterologous (e.g., exogenous) nucleic acid or protein (e.g., PAM-reduced or abolished Cas protein or the nucleic acid guided genome modifier/effector chimeric protein, complex or conjugate of the invention) or Ribonucleoprotein (RNP) thereof (e.g., the system of the invention), has been introduced. Persons of skill upon reading this disclosure will understand that such terms refer not only to the particular subject cell, but also is used to refer to the progeny of such a cell. Because certain modifications may occur in succeeding generations due to either mutation or environmental influences, developmental maturation, or due to the intended action of the invention, such progeny may not, in fact, be identical to the parent cell, but are still included within the scope of the term “host cell”. In some embodiments, the host cells provided by the invention are transduced or transfected by the nucleic acid sequences provided by the invention that encode the PAM abolished or reduced CRISPR-Cas proteins of the invention, any chimeric proteins thereof, and systems. This may refer in some embodiments, to cells that underwent a transfection procedure, meaning the introduction of a nucleic acid, e.g., an expression vector, or a replicating vector, into recipient cells by nucleic acid-mediated gene transfer. Alternatively, or in combination with nucleic acids encoding components of the invention, all or part of the components may be delivered as an RNA, as a protein, or as a preassembled RNP. Transfection of eukaryotic cells may be either transient or stable, and is accomplished by various ways known in the art.

[0316] For example, transfection of eukaryotic cells may be chemical, e.g. via a cationic polymer (such as DEAE-dextran, polyethyleneimine, dendrimer, polybrene, calcium), calcium phosphate (e.g. phosphate, lipofectin, DOTAP, lipofectamine, CTAB/DOPE, DOTMA) or via a cationic lipid. Transfection of eukaryotic cells may also be physical, e.g. via a direct injection (for example, by Micro-needle, AFM tip, Gene Gun,), via biolistic particle delivery (for example, phototransfection, Magnetofection), or via electroporation (i.e., Lonza Nucleofector), laser-irradiation, sonoporation or a magnetic nanoparticle. Transfection of eukaryotic cells may also be biological (i.e., use of Agrobacterium in plants).

[0317] The term “host cells” as used herein refers to any cell known to a skilled person wherein the functional fragments or peptides thereof or any nucleic acid molecule or combination thereof according to the invention may be introduced. For example, a host cell may be any prokaryotic or eukaryotic cell of a unicellular or multi-cellular organism. More specifically, eukaryotic host cell/s in accordance with the invention may include, but is not limited to a yeast, fungi, a plant, an insect cell, an invertebrate cell, vertebrate cell, mammalian cell and the like. It is understood that such terms refer not only to the particular subject cells but to the progeny or potential progeny of such a cell. Because certain modification may occur in succeeding generation due to either mutation or environmental influences, such progeny may not, in fact, be identical to the parent cell, but are still included within the scope of the term as used herein.

[0318] The “host cell” as used herein refers also to cells which can be transformed or transfected with naked DNA, any plasmid or expression vectors constructed using recombinant DNA techniques. A drug resistance or other selectable marker carried on the transforming or transfecting plasmid is intended in part to facilitate the selection of the transformants. Additionally, the presence of a selectable marker, such as drug resistance marker may be of use in keeping contaminating microorganisms from multiplying in the culture medium. Such a pure culture of the transformed host cell would be obtained by culturing the cells under conditions which require the phenotype for survival.

[0319] Eukaryotic cells may be mammalian cells, plant cells, fungi or cells of any organism. As used herein, the term “eukaryotic cell” refers to any cell type known to a person skilled in the art which is suitable for genetic manipulation. It should be noted that the term “eukaryotic cells” as used herein, further encompasses the autologous cells or allogeneic cells used by the methods of the invention via adoptive transfer, as discussed herein after in connection with other aspects of the invention. Thus eukaryote cells as herein defined may be derived from animals, plants and fungi, for example, but not limited to, insect cells, yeast cells or mammalian cells.

[0320] It should be further understood that the term “Cell”, is defined here as to comprise any type of cell, prokaryotic or a eukaryotic cell, isolated or not, cultured or not, differentiated or not, and comprising also higher level organizations of cells such as tissues, organs, calli, organisms or parts thereof. Exemplary cells include, but are not limited to: vertebrate cells, mammalian cells, human cells, plant cells, animal cells, invertebrate cells, nematodal cells, insect cells, stem cells, and the like.

[0321] Still further, it should be appreciated that the present disclosed further encompasses any cell or population of host cells as defined above, that are genetically modified or edited by the PAM-reduced or abolished Cas protein of the present disclosure or any chimera, conjugate, complex and system thereof. The invention further encompasses any genetically modified organism, either eukaryotic or prokaryotic that has been modified by the PAM-reduced or abolished Cas protein of the present disclosure, or to any tissue, cell (e.g., gamete cells, embryonic cells and the like) or organ derived from such genetically modified organism.

[0322] A further aspect of the invention relates to a composition comprising at least one of:

[0323] (a) at least one Cas protein or any Cas derived domain having reduced or abolished PAM constraint or any variant, mutant, fusion/chimeric protein, complex or conjugate thereof, or at least one nucleic acid sequence encoding the Cas protein or any fragment, variant, mutant, fusion/chimeric protein or conjugate thereof. It should be noted that in some optional embodiments, at least one of: the PBD and/or the PAM recognition motif, and/or the HNH-nuclease domain of the Cas protein, any fragment of the PBD, and/or of the PAM recognition motif, and/or of the HNH-nuclease domain, and at least one amino acid residue adjacent to the PBD, and/or to the PAM recognition motif, and/or to the HNH-nuclease domain, is deleted, substituted, mutated or replaced.

[0324] (b) at least one target recognition element or any nucleic acid sequence encoding such target recognition element.

[0325] (c) at least one nucleic acid cassette or any vector or vehicle comprising at least one of the nucleic acid sequence of (a), the nucleic acid sequence of (b) or the nucleic acid sequence of (a) and (b).

[0326] (d) at least one system comprising (a) and (b), and

[0327] (e) at least one host cell modified by, and/or comprising at least one of: the nucleic acid cassette or any vector or vehicle of (c) and the at least one system of (d);or any matrix, nano- or micro-particle comprising at least one of (a), (b), (c), (d) and (e). It should be noted that the composition of the invention may optionally further comprises at least one of pharmaceutically acceptable carrier/s, diluent/s, excipient/s and additive/s.

[0328] In some specific embodiments, the composition may comprise any of the CRISPR-Cas protein as defined by the invention, any of the fusion/chimeric protein, complex or conjugate thereof, specifically, the nucleic acid guided genome modifier/effector chimeric protein, complex or conjugate disclosed by the invention, and/or any of the nucleic acid molecules of the invention, and/or any of the systems disclosed by the invention, and/or any of the host cells is defined by the invention.

[0329] In some embodiments, the compositions of the invention may comprise as an active ingredient, any of the PAM-reduced or abolished Cas protein of the invention, any of the nucleic acid guided genome modifier/effector chimeric protein, complex or conjugate of the invention, any systems thereof, any encoding nucleic acid sequence or any host cell comprising the same. In some particular embodiments, the composition of the invention may comprise any of the chimeras disclosed by the invention, specifically, any chimera comprising the amino acid sequence of any one of SEQ ID NO. 2, 14, 15, 16, 17, 24-44, 45-48, 56, 210-213, 271-281, 284 and 288-290, 314-318, 320-323, 330-357, 362-366, and 375-396, 406, 407, 426-438, 440-480, 487-492.

[0330] More particular embodiments refer to the chimeras disclosed by the amino acid sequences as denoted by any one of SEQ ID NO. 2, 375, 444, 448, 467, 476, 478, 479 and 480, or any variants and derivatives thereof.. The term “effective amount” relates to the amount of an active agent present in a composition, specifically, the PAM abolished or reduced CRISPR-Cas proteins of the invention, any chimeric proteins thereof, RNPs thereof, systems thereof, nucleic acid sequence encoding said CRISPR-Cas proteins or any vectors thereof, host cell/s transformed or transfected by said nucleic acid sequences, as provided by the invention and described herein, or cells comprising any of the nucleic acid guided genome modifier/effector chimeric protein, complex or conjugate of the invention as disclosed herein, that is needed to provide a desired level of active agent in the bloodstream or at the site of action in an individual to be treated to give an anticipated physiological response when such composition is administered. The precise amount will depend upon numerous factors, e.g., the active agent, the activity of the composition, the delivery device employed, the physical characteristics of the composition, intended patient use (i.e., the number of doses administered per day), patient considerations, and the like, and can readily be determined by one skilled in the art, based upon the information provided herein.

[0331] An “effective amount” of the PAM abolished or reduced CRISPR-Cas proteins of the invention, any chimeric proteins thereof, systems, nucleic acid, host cell of the invention can be administered in one administration, or through multiple administrations of an amount that total an effective amount, preferably within a 24-hour period. It can be determined using standard clinical procedures for determining appropriate amounts and timing of administration. It is understood that the “effective amount” can be the result of empirical and/or individualized (case-by-case) determination on the part of the treating health care professional and/or individual.

[0332] In yet some further embodiments, the composition of the invention may optionally further comprise at least one of pharmaceutically acceptable carrier/s, excipient/s, additive/s diluent/s and adjuvant/s .

[0333] The pharmaceutical compositions of the invention can be administered and dosed by the methods of the invention, in accordance with good medical practice, systemically, for example by parenteral intravenous. It should be noted however that the invention may further encompass additional administration modes. In other examples, the pharmaceutical composition can be introduced to a site by any suitable route including intraperitoneal, subcutaneous, transcutaneous, topical, intramuscular, intraarticular, subconjunctival, or mucosal, e.g. oral, intranasal, or intraocular administration.

[0334] Local administration to the area in need of treatment may be achieved by, for example, by local infusion during surgery, topical application, direct injection into the specific organ. More specifically, the compositions used in any of the methods of the invention, described herein before, may be adapted for administration by parenteral, intraperitoneal, transdermal, oral (including buccal or sublingual), rectal, topical (including buccal or sublingual), vaginal, intranasal and any other appropriate routes. Such formulations may be prepared by any method known in the art of pharmacy, for example by bringing into association the active ingredient with the carrier(s) or excipient(s).

[0335] In yet some further embodiments, the composition of the invention may optionally further comprise at least one of pharmaceutically acceptable carrier/s, excipient/s, additive/s diluent/s and adjuvant/s.

[0336] More specifically, pharmaceutical compositions used to treat subjects in need thereof according to the invention, which may conveniently be presented in unit dosage form, may be prepared according to conventional techniques well known in the pharmaceutical industry. Such techniques include the step of bringing into association the active ingredients with the pharmaceutical carrier(s) or excipient(s). In general formulations are prepared by uniformly and intimately bringing into association the active ingredients, specifically the protein, nucleic acid, host cell of the invention with liquid carriers or finely divided solid carriers or both, and then, if necessary, shaping the product. The compositions may be formulated into any of many possible dosage forms such as, but not limited to, tablets, capsules, liquid syrups, soft gels, suppositories, and enemas. The compositions of the present invention may also be formulated as suspensions in aqueous, non-aqueous or mixed media. Aqueous suspensions may further contain substances which increase the viscosity of the suspension including, for example, sodium carboxymethylcellulose, sorbitol and/or dextran. The suspension may also contain stabilizers. The pharmaceutical compositions of the present invention also include, but are not limited to, emulsions and liposome-containing formulations.

[0337] It should be understood that in addition to the ingredients particularly mentioned above, the formulations may also include other agents conventional in the art having regard to the type of formulation in question.

[0338] Still further, pharmaceutical preparations are compositions that include the protein, nucleic acid, host cell of the invention present in a pharmaceutically acceptable vehicle. “Pharmaceutically acceptable vehicles” may be vehicles approved by a regulatory agency of the Federal or a state government or listed in the U.S. Pharmacopeia or other generally recognized pharmacopeia for use in mammals, such as humans. The term “vehicle” refers to a diluent, adjuvant, excipient, or carrier with which a compound of the invention is formulated for administration to a mammal Such pharmaceutical vehicles can be lipids, e.g. liposomes, e.g. liposome dendrimers; liquids, such as water and oils, including those of petroleum, animal, vegetable or synthetic origin, such as peanut oil, soybean oil, mineral oil, sesame oil and the like, saline; gum acacia, gelatin, starch paste, talc, keratin, colloidal silica, urea, and the like. In addition, auxiliary, stabilizing, thickening, lubricating and coloring agents may be used. Pharmaceutical compositions may be formulated into preparations in solid, semisolid or liquid such as tablets, capsules, powders, granules, ointments, solutions, suppositories, injections, inhalants, gels, microspheres, and aerosols. As such, administration of the protein, nucleic acid, host cell of the invention can be achieved in various ways, including oral, buccal, rectal, parenteral, intraperitoneal, intradermal, transdermal, intracheal, etc., administration. The active agent may be systemic after administration or may be localized by the use of regional administration, intramural administration, or use of an implant that acts to retain the active dose at the site of implantation. The active agent may be formulated for immediate activity or it may be formulated for sustained release.

[0339] Still further, the composition/s of the invention and any components thereof may be applied as a single one-time dose, as a single daily dose or multiple daily doses, preferably, every 1 to 7 days. It is specifically contemplated that such application may be carried out once or several times in the lifetime of a patient, once, twice, thrice, four times, five times or six times daily, or may be performed once daily, once every 2 days, once every 3 days, once every 4 days, once every 5 days, once every 6 days, once every week, two weeks, three weeks, four weeks or even more than a month. The application of the PAM abolished or reduced CRISPR-Cas proteins, any chimeric proteins thereof, systems thereof, nucleic acid sequence encoding said CRISPR-Cas proteins or any vectors thereof, host cell/s transformed or transfected by said nucleic acid sequence, in accordance with the invention or of any component thereof, or the effects thereof, may last up to the lifetime of the patient, a day, two days, three days, four days, five days, six days, a week, two weeks, three weeks, four weeks, a month, two months three months or even more. More specifically, for one, two, three, four, five, six, seven, eight, nine, ten, eleven, twelve months of more or for several years.

[0340] In yet a further aspect, the invention provides a method of modifying at least one target nucleic acid sequence of interest in at least one cell or in a biochemical reaction. More specifically, the method may comprise the steps of contacting the cell or the biochemical reaction with:

[0341] First (a), at least one Cas protein having reduced or abolished PAM constraint or any fragment, variant, mutant, fusion/chimeric protein, complex or conjugate thereof, or at least one nucleic acid sequence encoding said Cas protein or any variant, mutant, fusion/chimeric protein, complex or conjugate thereof. It should be noted that in some optional embodiments, at least one of: the PBD and/or the PAM recognition motif, and/or the HNH-nuclease domain of the Cas protein, any fragment of the PBD, and/or of the PAM recognition motif, and/or of the HNH-nuclease domain, and at least one amino acid residue adjacent to the PBD, and/or to the PAM recognition motif, and/or to the HNH-nuclease domain, is deleted, substituted, mutated or replaced; and

[0342] Second (b), at least one target recognition element or any nucleic acid sequence encoding such target recognition element.

[0343] Alternatively, the method may involve contacting the cell or the biochemical reaction with (c), at least one nucleic acid cassette or any vector or vehicle comprising the nucleic acid sequence of (a), the nucleic acid sequence of (b) or the nucleic acid sequence of (a) and (b).

[0344] In yet some further embodiments (d), the cells or the biochemical reaction may be contacted with at least one system or composition comprising (a) and (b).

[0345] The invention provides methods for modifying at least one target nucleic acid sequence of interest in a target cell or in a biochemical reaction. It should be understood that as used herein, modifications performed in the target nucleic acid sequence encompass either physical modifications or functional modifications as discussed herein. Thus, in some embodiments, modifications include but are not limited to cleavage, deletion, insertion, replacement, binding, digestion, nicking, methylation, acetylation, ligation, recombination, helix unwinding, chemical modification, labeling, activation, and inactivation or any combinations thereof, as well as any editing activity (e.g., mutation, substitution, replacement, deletion or insertion of at least a part of the target sequence). Still further, functional modifications of the target sequence may lead to, but is not limited to: changes in transcriptional activation, transcriptional inactivation, alternative splicing, chromatin rearrangement, pathogen inactivation, virus inactivation, change in cellular localization, compartmentalization of nucleic acid, changes in stability, and the like, or combinations thereof.

[0346] As noted above, modifications of a target sequence by the methods of the invention, may include editing of the target sequence. It should be therefore understood that in some embodiments, both directed non-homologous-end-joining (NHEJ) and assisted homologous recombination (HR) may be utilized by the methods of the invention specifically and in a programmable manner to achieve one or more of the following:

[0347] (a) Mutating a DNA sequence by cleaving inside it, creating a double strand break (DSB), to be somewhat degraded by the endogenous nucleases and re-ligated by the endogenous NHEJ DNA repair mechanism to create either an in-frame deletion and/or a frame-shift mutation of the DNA.

[0348] In NHEJ one or more nucleotides may also be added in the DSB in a yet uncharacterized endogenous mechanism, essentially achieving the same effect of frame shifting or mutation.

[0349] (b) Deleting a stretch of DNA sequence by cleaving two sequences flanking it, to be re-ligated by the endogenous NHEJ DNA repair mechanism, or by assisted HR by cleaving in or near the sequence to be deleted and supplying a donor DNA which is subsequently recombined into the target, and which contains sequences flanking the sequence to be deleted in the target.

[0350] (c) Inserting a donor nucleic acid into a DSB by cleaving a target nucleic acid and supplying a Donor DNA to be either ligated directly into the gap by the NHEJ mechanism, or preferably, supplying a donor that has homology to the ends of the gap to be recombined and ligated into the gap by assisted HR.

[0351] (d) Replace a target nucleic acid sequence by cleaving both sequences flanking it, and supplying a donor nucleic acid to be inserted, to be ligated within the target flanking sequence either by NHEJ, or preferably, recombined and ligated by HR, by adding sequences similar to the target nucleic acid, or those flanking it, at the termini of the donor. “Donor nucleic acid” is defined here as any nucleic acid supplied to an organism or receptacle to be inserted or recombined wholly or partially into the target sequence either by DNA repair mechanisms, homologous recombination (HR), or by non-homologous end-joining (NHEJ).

[0352] As indicated above, the method of the invention involves contacting the target cell or the biochemical reaction with the PAM-reduced or abolished Cas protein of the invention or any fusion protein of conjugate thereof, specifically, any of the nucleic acid guided genome modifier/effector chimeric protein, complex or conjugate of the invention and any systems thereof. The term “contacting” as used herein, means to bring, put, incubate or mix together. More specifically, in the context of the present invention, the term “contacting” includes all measures or steps, which allow the protein or nucleic acid molecules, vectors, vehicles, compositions or systems of the invention such that they are in direct or indirect contact with the target cell/s, the genetic material of the cell or the nucleic acid sequence of interest in said biochemical reaction. To induce the desired modification of the target nucleic acid sequence as discussed herein, either in vitro or in vivo, the nucleic acid molecules, proteins, RNAs, RNPs or combinations thereof of the invention may be provided to and/or contacted with the target cells for about several minutes to about 24 hours, e.g., 5 minutes, 10 minutes, 15 minutes, 20 minutes, 25 minutes, 30 minutes, 1 hour, 1.5 hours, 2 hours, 2.5 hours, 3 hours, 3.5 hours 4 hours, 5 hours, 6 hours, 7 hours, 8 hours, 12 hours, 16 hours, 18 hours, 20 hours, or any other period from about 30 minutes to about 24 hours, which may be repeated with a frequency of about every day to about every 4 days, e.g., every 1 .5 days, every 2 days, every 3 days, or any other frequency from about every day to about every four days. The nucleic acid proteins, RNAs, RNPs molecules of the invention or any combinations thereof, may be provided to the target cells one or more times, e.g. one time, twice, three times, or more than three times, and the cells allowed to incubate with the nucleic acid molecules for some amount of time following each contacting event e.g. 16-24 hours.

[0353] In some embodiments, the CRISPR-Cas protein used by the methods of the invention may be any of the Cas proteins as defined as defined by the invention. In yet some further embodiments, any of the fusion/chimeric protein or conjugate of such Cas proteins that may be used by the methods of the invention, may be the nucleic acid guided genome modifier chimeric protein, complex or conjugate according to any one as defined by the invention. More specifically, any of the modifiers/effectors of the invention that comprise the amino acid sequence of any one of SEQ ID NO. 2, 14, 15, 16, 17, 24-44, 45-48, 56, 210-213, 271-281, 284 and 288-290, 314-318, 320-323, 330-357, 362-366, and 375-396, 406, 407, 426-438, 440-480, 487-492, or any variants or derivatives thereof. More particular embodiments refer to the chimeras disclosed by the amino acid sequences as denoted by any one of SEQ ID NO. 2, 375, 444, 448, 467, 476, 478, 479 and 480, or any variants and derivatives thereof. In yet some further embodiments, the methods of the invention may use any of the nucleic acid molecules disclosed by the invention. Still further, the method of the invention may use any of the systems disclosed by the invention.

[0354] In some embodiments, the method of the invention may be applicable for any cell of at least one organism of the biological kingdom Animalia. In some embodiments, the method of the invention may be applicable for any cell of at least one organism of the biological kingdom Animalia. In more specific embodiments, such cell may be derived from any unicellular or multicellular invertebrate or vertebrate. More specifically, cells derived from invertebrates, are cells derived from an organism of the Phylum Porifera—Sponges, the Phylum Cnidaria—Jellyfish, hydras, sea anemones, corals, the Phylum Ctenophora—Comb jellies, the Phylum Platyhelminthes—Flatworms, the Phylum Mollusca—Molluscs, the Phylum Arthropoda—Arthropods, the Phylum Annelida—Segmented worms like earthworm and the Phylum Echinodermata—Echinoderms. Still further, in some embodiments, the methods of the invention may be applicable for a cell derived from any vertebrate organism, specifically, an organism derived from any of the vertebrates groups that include Fish, Amphibians, Reptiles, Birds and Mammals (e.g., Marsupials, Primates, Rodents and Cetaceans),In some particular embodiments, the methods of the invention may be particularly applicable for modifying a target nucleic acid sequence of interest in a cell of a mammal (specifically, at least one of a human, Cattle, rodent, domestic pig (swine, hog), sheep, horse, goat, alpaca, lama and Camels), an avian, an insect, a fish, an amphibian, a reptile, a crustacean, a crab, a lobster, a snail, a clam, an octopus, a starfish, a sea-urchin, jellyfish, and worms.

[0355] The methods of the invention provide targeted modification (either physical or functional as discussed above) of a target nucleic acid sequence of interest, in a target cell.

[0356] The term “target nucleic acid sequence of interest” as used herein refers to a gene or fragments thereof, or any coding or non-coding or regulatory sequence in chromosomal DNA, or in DNA of any organelle of a eukaryotic cell, for example, mitochondria, chloroplast, amyloplast and chromoplast, any non-chromosomal and/or exogenous nucleic acid sequence (e.g., plasmid/s, viruses and/or other genetic elements), or any fragment thereof to be targeted for mutation, deletion, insertion, replacement, repression, activation, or any other modulations as specified above. It should be appreciated that in some embodiments, the target sequence may be a predetermined target sequence.

[0357] Still further, it should be understood that “Gene” as used herein, may be a natural (e.g., genomic) or synthetic gene comprising transcriptional and/or translational regulatory sequences and/or a coding region and/or non-translated sequences (e.g., introns, 5′- and 3 ′-untranslated sequences). The coding region of a gene may be a nucleotide sequence coding for an amino acid sequence or a functional RNA, such as tRNA, rRNA, catalytic RNA, siRNA, miRNA or antisense RNA. A gene may also be an mRNA or cDNA corresponding to the coding regions (e.g., exons and miRNA) optionally comprising 5′- or 3 ′-untranslated sequences linked thereto. A gene may also be an amplified nucleic acid molecule produced in vitro comprising all or a part of the coding region and/or 5′- or 3 ′-untranslated sequences linked thereto.

[0358] Still further, in some embodiments, the target nucleic acid sequence is a DNA sequence. In some embodiments, the target DNA is genomic DNA. It should be understood that in some embodiments, the term “genomic DNA” encompasses chromosomal DNA, and also mitochondrial genome. Thus, in some embodiments, the target nucleic acid sequence is an extra-chromosomal nucleic acid sequence. In some specific embodiments, the extra-chromosomal target nucleic acid sequence resides in an organelle such as mitochondria, chloroplast, amyloplast, chromoplast, and any non-chromosomal and/or exogenous nucleic acid sequence (e.g., plasmid/s, viruses and/or other genetic elements). In some embodiments, the target nucleic acid sequence is a viral nucleic acid sequence. In some embodiments, the target nucleic acid sequence is a synthetic nucleic acid sequence.

[0359] In some further embodiments, the target nucleic acid sequence of interest modified in a target cell or in a biochemical reaction by the methods of the invention may be, or may be comprised within at least one of: at least one gene encoding at least one tumor associated antigen (TAA), at least one gene encoding at least one immune checkpoint receptor proteins or ligand, at least one gene encoding a protein involved in at least one congenital disorder, at least one gene encoding at least one gene encoding receptors for at least one viral antigen, at least one gene associated with at least one inborn error of metabolism (IEM) disorder, Immunoglobulin locus, T cell receptor (TCR) locus, safe harbor site/s (SHS), and any coding sequence or non-coding sequence involved with at least one pathologic disorder.

[0360] As indicated above, the target nucleic acid sequence may be any sequence encoding a tumor associated antigen. Thus, in some embodiments, the target genes targeted by the methods of the invention may be genes associated with or encoding at least one TAA. Tumor or cancer associated antigen (TAA), as used herein may be an antigen that is specifically expressed, over expressed or differentially expressed in tumor cells. In yet some further embodiments, TAA can stimulate tumor-specific T-cell immune responses. Exemplary tumor antigens that may be applicable in the present invention, include, but are not limited to, RAGE-1, tyrosinase, MAGE-1, MAGE-2, NY-ESO-1, Melan-A/MART-1, glycoprotein (gp) 75, gp100, MUC1, beta-catenin, PRAME, MUM-1, WT-1, CEA, PR-1 CD45, glypican-3, IGF2B3, Kallikrein4, KIF20A, Lengsin, Meloe, MUC5AC, survivin, CLPP, Cyclin-A1, SSX2, XAGE1b/GAGED2a, MAGE-A3, MAGE-A6, LAGE-1, CAMEL, hTRT and Eph. and TRP-1. Still further, TAA may be recognized by CD8+T cells as well as CD4+T cells. Non limiting examples of TAA recognized by CD8+T cells may be CSNK1A1, GAS7, HAUS3, PLEKHM2, PPP1R3B, MATN2, CDK2, SRPX (P55L), WDR46 (T227I), AHNAK (S4460F), COL18A1 (S126F), ERBB2 (H197Y), TEAD1 (L209F), NSDHL (A290V), GANAB (S184F), TRIP12 (F1544S), TKT (R438W), CDKN2A (E153K), TMEM48 (F169L), AKAP13 (Q285K), SEC24A (P469L), OR8B3 (T190I), EXOC8 (Q656P), MRPS5 (P59L), PABPC1 (R520Q), MLL2, ASTN1, CDK4, GNL3L, SMARCD3, MAGE-A6, MED13, PAS5A WDR46, HELZ2, AFMID, CENPL, PRDX3, FLNA, KIF16B, SON, MTFR2 (D626Y), CHTF18 (L769V), MYADM (R30W), NUP98 (A359D), KRAS (G12D), CASP8 (F67V), TUBGCP2 (P293L), RNF213 (N1702S), SKIV2L (R653H), H3F3B (A48T), AP15 (R243Q), RNF10 (E572K), PHLPP1 (G566E) and ZFYVE27 (R6H). Non limiting examples of TAA recognized by CD4+T cells may be ERBB2IP (E805G), CIRH1A (P333L), GART (V551A), ASAP1 (P941L), RND3 (P49S), LEMD2 (P495L), TNIK (S502F), RPS12 (V104I), ZC3H18 (G269R), GPD2 (E426K), PLEC (E1179K), XPO7 (P274S), AKAP2 (Q418K) and ITGB4 (S1002I). Non-limiting examples of MHC class II-restricted antigens may be Tyrosinase, gp100, MART-1, MAGE-A1, MAGE-A2, MAGE-A3, MAGE-A6, LAGE-1, CAMEL, NY-ESO-1, hTRT and Eph.

[0361] Cancer antigen and tumor antigen are used interchangeably herein. The antigens may be related to cancers that include, but are not limited to, Acute lymphoblastic leukemia; Acute myeloid leukemia; Adrenocortical carcinoma; AIDS-related cancers; AIDS-related lymphoma; Anal cancer; Appendix cancer; Astrocytoma, childhood cerebellar or cerebral; Basal cell carcinoma; Bile duct cancer, extrahepatic; Bladder cancer; Bone cancer, Osteosarcoma/Malignant fibrous histiocytoma; Brainstem glioma; Brain tumor; Brain tumor, cerebellar astrocytoma; Brain tumor, cerebral astrocytoma/malignant glioma; Brain tumor, ependymoma; Brain tumor, medulloblastoma; Brain tumor, supratentorial primitive neuroectodermal tumors; Brain tumor, visual pathway and hypothalamic glioma; Breast cancer; Bronchial adenomas/carcinoids; Burkitt lymphoma; Carcinoid tumor, childhood; Carcinoid tumor, gastrointestinal; Carcinoma of unknown primary; Central nervous system lymphoma, primary; Cerebellar astrocytoma, childhood; Cerebral astrocytoma/Malignant glioma, childhood; Cervical cancer; Childhood cancers; Chronic lymphocytic leukemia; Chronic myelogenous leukemia; Chronic myeloproliferative disorders; Colon Cancer; Cutaneous T-cell lymphoma; Desmoplastic small round cell tumor; Endometrial cancer; Ependymoma; Esophageal cancer; Ewing's sarcoma in the Ewing family of tumors; Extracranial germ cell tumor, Childhood; Extragonadal Germ cell tumor; Extrahepatic bile duct cancer; Eye Cancer, Intraocular melanoma; Eye Cancer, Retinoblastoma; Gallbladder cancer; Gastric (Stomach) cancer; Gastrointestinal Carcinoid Tumor; Gastrointestinal stromal tumor (GIST); Germ cell tumor: extracranial, extragonadal, or ovarian; Gestational trophoblastic tumor; Glioma of the brain stem; Glioma, Childhood Cerebral Astrocytoma; Glioma, Childhood Visual Pathway and Hypothalamic; Gastric carcinoid; Hairy cell leukemia; Head and neck cancer; Heart cancer; Hepatocellular (liver) cancer; Hodgkin lymphoma; Hypopharyngeal cancer; Hypothalamic and visual pathway glioma, childhood; Intraocular Melanoma; Islet Cell Carcinoma (Endocrine Pancreas); Kaposi sarcoma; Kidney cancer (renal cell cancer); Laryngeal Cancer; Leukemias; Leukemia, acute lymphoblastic (also called acute lymphocytic leukemia); Leukemia, acute myeloid (also called acute myelogenous leukemia); Leukemia, chronic lymphocytic (also called chronic lymphocytic leukemia); Leukemia, chronic myelogenous (also called chronic myeloid leukemia); Leukemia, hairy cell; Lip and Oral Cavity Cancer; Liver Cancer (Primary); Lung Cancer, Non-Small Cell; Lung Cancer, Small Cell; Lymphomas; Lymphoma, AIDS-related; Lymphoma, Burkitt; Lymphoma, cutaneous T-Cell; Lymphoma, Hodgkin; Lymphomas, Non-Hodgkin (an old classification of all lymphomas except Hodgkin's); Lymphoma, Primary Central Nervous System; Marcus Whittle, Deadly Disease; Macroglobulinemia, Waldenstrom; Malignant Fibrous Histiocytoma of Bone/Osteosarcoma; Medulloblastoma, Childhood; Melanoma; Melanoma, Intraocular (Eye); Merkel Cell Carcinoma; Mesothelioma, Adult Malignant; Mesothelioma, Childhood; Metastatic Squamous Neck Cancer with Occult Primary; Mouth Cancer; Multiple Endocrine Neoplasia Syndrome, Childhood; Multiple Myeloma/Plasma Cell Neoplasm; Mycosis Fungoides; Myelodysplastic Syndromes; Myelodysplastic/Myeloproliferative Diseases; Myelogenous Leukemia, Chronic; Myeloid Leukemia, Adult Acute; Myeloid Leukemia, Childhood Acute; Myeloma, Multiple (Cancer of the Bone-Marrow); Myeloproliferative Disorders, Chronic; Nasal cavity and paranasal sinus cancer; Nasopharyngeal carcinoma; Neuroblastoma; Non-Hodgkin lymphoma; Non-small cell lung cancer; Oral Cancer; Oropharyngeal cancer; Osteosarcoma/malignant fibrous histiocytoma of bone; Ovarian cancer; Ovarian epithelial cancer (Surface epithelial-stromal tumor); Ovarian germ cell tumor; Ovarian low malignant potential tumor; Pancreatic cancer; Pancreatic cancer, islet cell; Paranasal sinus and nasal cavity cancer; Parathyroid cancer; Penile cancer; Pharyngeal cancer; Pheochromocytoma; Pineal astrocytoma; Pineal germinoma; Pineoblastoma and supratentorial primitive neuroectodermal tumors, childhood; Pituitary adenoma; Plasma cell neoplasia/Multiple myeloma; Pleuropulmonary blastoma; Primary central nervous system lymphoma; Prostate cancer; Rectal cancer; Renal cell carcinoma (kidney cancer); Renal pelvis and ureter, transitional cell cancer; Retinoblastoma; Rhabdomyosarcoma, childhood; Salivary gland cancer; Sarcoma, Ewing family of tumors; Sarcoma, Kaposi; Sarcoma, soft tissue; Sarcoma, uterine; Sezary syndrome; Skin cancer (nonmelanoma); Skin cancer (melanoma); Skin carcinoma, Merkel cell; Small cell lung cancer; Small intestine cancer; Soft tissue sarcoma; Squamous cell carcinoma—see Skin cancer (nonmelanoma); Squamous neck cancer with occult primary, metastatic; Stomach cancer; Supratentorial primitive neuroectodermal tumor, childhood; T-Cell lymphoma, cutaneous (Mycosis Fungoides and Sezary syndrome); Testicular cancer; Throat cancer; Thymoma, childhood; Thymoma and Thymic carcinoma; Thyroid cancer; Thyroid cancer, childhood; Transitional cell cancer of the renal pelvis and ureter; Trophoblastic tumor, gestational; Unknown primary site, carcinoma of, adult; Unknown primary site, cancer of, childhood; Ureter and renal pelvis, transitional cell cancer; Urethral cancer; Uterine cancer, endometrial; Uterine sarcoma; Vaginal cancer; Visual pathway and hypothalamic glioma, childhood; Vulvar cancer; Waldenstrom macroglobulinemia and Wilms tumor (kidney cancer). In some specific embodiments, a TAA targeted by the methods of the invention may be the SIGLEC10 gene.

[0362] In some further embodiments, the methods of the invention may target regulatory sequences, such sequences may include any non-coding sequence. In some embodiments, the target sequence targeted by the methods of the invention is the Empty Spiracles Homeobox 1 (EMX1) gene, that encodes a member of the EMX family of transcription factors. The EMX1 gene, along with its family members, are expressed in the developing cerebrum and plays a role in specification of positional identity, the proliferation of neural stem cells, differentiation of layer-specific neuronal phenotypes and commitment to aneuronalor glial cell fate. The human EMX1 gene has a sequence as provided by NCBI Accession Number NC_000002.12, range 72910949-72936691 (NCBI gene ID 2016),In yet some further embodiments, the human EMX1 protein is denoted by NCBI Accession Number NP 004088.2.

[0363] According to some embodiments, the target nucleic acid sequence is a gene or any fragment thereof or any non-coding sequence involved in a genetic trait, and the modification results in changes in the transcription or translation of a genetic element, by a technical procedure that may include permanently replacing, knocking-out, temporarily or permanently enhancing, shutting-off, knocking-down, and frameshifting. In some embodiments, the genetic trait is modified by editing the genetic element sequence itself, its regulatory sequences, genes regulating the gene of interest or their regulatory sequences in a regulatory chain of events.

[0364] In some embodiments, the target sequence may be a target gene or any other coding and/or non-coding sequence involved in a congenital disorder. In some particular embodiments, such gene may be a gene involved in Autosomal dominant Retinitis Pigmentosa (adRP). In some further specific embodiments, the target gene may be the rhodopsin (RHO) gene. The RHO gene (also known as long Wavelength Sensitive opsin, L opsin, LWS opsin, MGC:21585, MGC:25387, Noerg 1, Opn2, Ops, opsin 2, Red Opsin, Rod Opsin, RP4), encodes a photoreceptor required for image-forming vision at low light intensity and for photoreceptor cell viability after birth. The protein encoded by this gene is found in rod cells that can sense light and initiate the phototransduction cascade in rod photoreceptors. The encoded protein binds to 11-cis retinal and is activated when light hits the retinal molecule. Defects in this gene are a cause of congenital stationary night blindness. The human RHO gene has a sequence as provided by NCBI Accession Number: NC_000003.12 (range 129528639-129535344) (Gene ID 6010). In yet some further embodiments, the human RHO protein is denoted by NCBI Accession Number NP_000530.1.

[0365] In some other embodiment, the target gene may be the Myeloperoxidase (MPO) gene. Myeloperoxidase (MPO), as used herein, is the most toxic enzyme found in the azurophilic granules of neutrophils. MPO utilizes H202 to generate hypochlorous acid (HClO) and other reactive moieties, which kill pathogens during infections. The MPO gene is located on the long arm segment q12-24 of chromosome 17 and the primary transcriptional product of this gene consists of 11 introns and 12 exons. Alternative splicing of the MPO mRNA gives two transcripts of 3.6 and 2.9 kB. The primary translation product is an 80 kDa precursor protein that undergoes a series of modifications including cleavage of a signal peptide, N-linked glycosylation, and limited deglycosylation, to form the catalytically inactive MPO precursor (apoproMPO). In the next step, MPO gains catalytic activity by incorporation of an iron-heme molecule into the catalytic centrum. Heme is covalently attached by two ester bonds and, unique for heme containing enzymes, a third sulfonium linkage, that uniquely orients one heme molecule into the enzyme pocket. The unique configuration of the heme moiety confers MPO with very high oxidative potential, enabling chlorination at physiological pH. Cleavage of proMPO leads to a 59 kDa a-subunit and a 13.5 kDa (3-subunit that are covalently attached through the heme moiety. A disulfide bridge joins the two heavy-light protomers in mature 150 kDa MPO. MPO expression levels depend upon allelic polymorphisms in the promoter region. Neutrophils are the main source of MPO where it accounts for 5% of the dry weight of the cell, making MPO the most abundant protein in neutrophils. MPO is transcribed only in promyelocytes during neutrophil differentiation in the bone marrow.

[0366] It should be further appreciated that in the context of the present disclosure, unless specifically indicated “MPO” encompasses both the MPO gene and the MPO protein. The human MPO gene has a sequence as provided by Accession Number: NC_000017.11. In yet some further specific embodiment, such sequence may comprise the nucleic acid sequence as denoted by SEQ ID NO: 373. In yet some further embodiments, the human MPO protein is denoted by Accession Number: NP_000241. Still further in some embodiments, the MPO protein may comprise the amino acid sequence as denoted by SEQ ID NO: 374. Still further in some other specific embodiment, the invention further provides the mouse MPO encoding sequence as denoted by Accession Number NC_000077, that may in some embodiments comprise the nucleic acid sequence as denoted by SEQ ID NO: 397. In yet some further embodiments, the mouse MPO protein is denoted by Accession Number: NP_034954. Still further in some embodiments, the mouse MPO protein may comprise the amino acid sequence as denoted by SEQ ID NO: 398.

[0367] MPO plays a role in suppressing the adaptive immune response. Mechanistically, MPO released from neutrophils inhibits LPS-induced DC activation as measured by decreased IL-12 production and CD86 expression consequently, limiting T cell proliferation and proinflammatory cytokine production. In contrast, a pathogenic role for MPO in driving autoimmune inflammation was also demonstrated. More specifically, increased MPO levels and activity have been observed in many inflammatory conditions and autoimmune diseases including multiple sclerosis (MS) and rheumatoid arthritis (RA). MPO plays a role in modulation of vasculature functioning, associated with chronic vascular diseases such as atherosclerosis. In the extracellular matrix (ECM), MPO works as a nitric oxide(NO)-scavenger consuming NO that leads to impaired endothelial relaxation. MPO and its oxidative species present in the atherothrombotic tissue, promotes lipid peroxidation, conversion of LDL to a highly-uptake atherogenic form, selectively modulates Apolipoprotein A-I (apoA-I) generating dysfunctional HDL particles more susceptible to degradation and impairs the ability of apoA-I to promote cholesterol efflux. Moreover, elevated systemic levels of MPO and its oxidation products are associated with increased cardiovascular risk. As indicated above, MPO has been implicated in variety of pathologic conditions, and thereof targeting the MPO gene provides a specific therapeutic tool for treating and preventing disorders or conditions caused thereby.

[0368] In yet some further embodiments, the congenital disorder may be Pseudoachondroplasia (PSACH). In some specific embodiments, the gene targeted by the methods of the invention may be the Cartilage Oligomeric Matrix Protein (COMP) gene. The protein encoded by this gene is a noncollagenous extracellular matrix (ECM) protein. It consists of five identical glycoprotein subunits, each with EGF-like and calcium-binding (thrombospondin-like) domains. Oligomerization results from formation of a five-stranded coiled coil and disulfides. Binding to other ECM proteins such as collagen appears to depend on divalent cations. Contraction or expansion of a 5 aa aspartate repeat and other mutations can cause pseudochondroplasia (PSACH) and multiple epiphyseal dysplasia (MED). The human COMP gene has a sequence as provided by NCBI Accession Number NC_000019.10 (18782773..18791305, complement) (Gene ID 1311). In yet some further embodiments, the human COMP protein is denoted by NCBI Accession Number NP_000086.2.

[0369] Still further in some embodiments, immune checkpoint receptor proteins or ligands (such as those targeted by checkpoint inhibitors in cancer checkpoint therapy and which can block inhibitory checkpoints, restoring immune system function) and any genes encoding such receptors or ligands may be targeted by the methods of the invention. More specifically, the methods of the invention may target immune checkpoint receptor proteins or ligands that include PD-1/PD-L1 and CTLA-4/B7-1/B7-2. In some specific embodiments, the target gene is a gene encoding the PDCD1 gene. Programmed Cell Death 1 PDCD1, also known as PD-1 and CD279, encodes a cell surface membrane protein of the immunoglobulin superfamily that has a role in regulating the immune system's response to the cells of the human body by down-regulating the immune system and promoting self-tolerance by suppressing T cell inflammatory activity, thus functioning as an immune checkpoint. The human PDCD1gene has a sequence as provided by NCBI Accession Number: NC_000002.12 (241849881..241858908, complement) (GENE ID 5133). In yet some further embodiments, the human PDCD1 protein is denoted by NCBI Accession Number: NP_005009.2.

[0370] In yet some further embodiments, the target gene may be the CTLA4 gene that encodes CTLA4. CTLA4 or CTLA-4 (cytotoxic T-lymphocyte-associated protein 4), also known as CD152 (cluster of differentiation 152), is a protein receptor that functions as an immune checkpoint and downregulates immune responses. CTLA4 is constitutively expressed in regulatory T cells but only upregulated in conventional T cells after activation. The human CTLA4gene has a sequence as provided by NCBI Accession Number: NC_000002.12 (203867771..203873965) (GENE ID 1493). In yet some further embodiments, the human CTLA4 protein is denoted by NCBI Accession Number: NP_001032720.1.

[0371] Still further, in some embodiments, the target nucleic acid sequence of the invention may be any gene encoding, or a sequence involved in the expression of immunological receptors, specifically, T cell receptors (TCR), B cell receptors (BCR) and antibodies. According to such embodiments, the target sequence targeted by the methods of the invention may be located at the immunoglobulin locus, specifically, any one of the Immunoglobulin heavy chain locus, Immunoglobulin lc chain locus, Immunoglobulin 2 chain locus, TCRP chain locus, TCRa chain locus, TCRy chain and the TCR6 chain locus.

[0372] In yet some further embodiments, the target sequence may be a sequence enabling insertion of a desired nucleic acid sequence. In more specific embodiments, the target sequence may be within GSHs. Genomic safe harbors (GSHs) are sites in the genome able to accommodate the integration of new genetic material in a manner that ensures that the newly inserted genetic elements: (i) function predictably and (ii) do not cause alterations of the host genome posing a risk to the host cell or organism. GSHs are thus ideal sites for transgene insertion whose use can empower functional genetics studies in basic research and therapeutic applications in human gene therapy. Non-limiting examples for SHS sites applicable in the present invention include the human AAVS1 site on chromosome 19q, and the human ROSA26, and CCR5 sites. In should be appreciated that in some embodiments of the invention, GSHs may be useful as target sequences, particularly in cases where it is desired to express an exogenous nucleic acid sequence of interest in a specific cell. Such encoding sequence may be inserted in GSH sites. Non-limiting examples for such exogenous nucleic acid sequences that can be inserted in GSHs, may be any sequence encoding a receptor or chimeric receptor, for example, any chimeric antigen receptor (CAR).

[0373] In yet some further embodiments, the target nucleic acid sequence may be a gene encoding viral receptors, for example, the Integrin Subunit Beta 3 (ITGB3) gene. The ITGB3 protein product is the integrin beta chain beta 3. Integrins are integral cell-surface proteins composed of an alpha chain and a beta chain. A given chain may combine with multiple partners resulting in different integrins. Integrin beta 3 is found along with the alpha Ilb chain in platelets. The human ITGB3 gene has a sequence as provided by NCBI Accession Number: NC_000017.11 (47253827..47313743) (GENE ID 3690). In yet some further embodiments, the human ITGB3 protein is denoted by NCBI Accession Number: NP_000203.2.

[0374] Still further, in some embodiments, the methods of the invention may be applicable for modifying at least one target nucleic acid sequence of interest in any cell of at least one organism of the biological kingdom Plantae.

[0375] It should be understood that the modification of a target nucleic acid sequence in a cell may be performed by the methods of the invention either in vitro/ex vivo or in vivo. “In vitro” is defined herein as an artificial environment outside the membranes of a whole or partial, differentiated or undifferentiated, living organism, organ, tissue, callus or cell. In some embodiments, the term in-vitro is not inside a viable cell.

[0376] “In vivo” is defined herein as inside a whole or partial, differentiated or undifferentiated, organism, organ, tissue, callus or cell.

[0377] It should be noted that in some embodiments, the method of the invention may be applicable for modification of at least one target nucleic acid sequence of interest in at least one cell may be performed in at least one organism of at least one of: the biological kingdom Plantae and the biological kingdom Animalia. Thus, as indicated above, the invention provides in vitro or ex vivo methods for performing a targeted modification in a gene in a cell or any parts thereof or in a tissue, or alternatively, in vivo methods for performing the desired manipulation in an organism, as disclosed by the invention.

[0378] As indicated above, the invention provides methods of manipulating a nucleic acid sequence of interest in a biological reaction or in a cell either in vitro/ex vivo, or in vivo in a target organism. The invention thus provides in some embodiments thereof non-therapeutic, and well as therapeutic methods based on manipulations and modifications of nucleic acid sequences of interest in a treated subject, and therefore relates to gene therapy. The non-therapeutic applications of such methods may encompass cosmetic, diagnostic and agricultural uses. The term “gene therapy” as herein defined, refers to the correction, modulation or ablation of at least one target gene. This term further encompasses insertion of a gene of interest into a target locus (e.g., chimeric receptors, such as CAR, TCRs, BCRs, or antibodies), or replacement of an endogenous gene with at least one nucleic acid sequence of interest. The method of the invention is also suitable for the treatment of diseases caused by the failure of a single gene, or of multiple genes (also referred to as polygenic or chromosomal), and is applicable in cases were specific mutations resulting in a defective gene or gene are identified or not.

[0379] The method of the invention is thus suitable for the treatment of diseases caused by the failure of a single gene, or of multiple genes (also referred to as polygenic or chromosomal), provided that the specific mutations resulting in a defective gene or gene are identified. Theoretically, if the dysfunctional gene is replaced with the corresponding healthy one, or alternatively, is knocked out or modulated, a cure can be achieved.

[0380] Thus, a further aspect of the invention relates to a method of curing or treating, preventing, inhibiting, reducing, eliminating, protecting or delaying the onset of a pathologic disorder or condition in a subject in need thereof. More specifically, the method of the invention may comprise the steps of administering to the treated subject an effective amount of at least one of:

[0381] (a) at least one Cas protein or any Cas protein derived domain, having reduced or abolished PAM constraint or any fragment, variant, mutant, fusion/chimeric protein, complex or conjugate thereof, or alternatively or additionally, at least one nucleic acid sequence encoding the Cas protein or any variant, mutant, fusion/chimeric protein, complex or conjugate thereof. It should be noted that in some optional embodiments, at least one of: the PBD and/or the PAM recognition motif, and/or the HNH-nuclease domain of the Cas protein, any fragment of the PBD, and/or of the PAM recognition motif, and/or of the HNH-nuclease domain, and at least one amino acid residue adjacent to the PBD, and/or to the PAM recognition motif, and/or to the HNH-nuclease domain, is deleted, substituted, mutated or replaced;

[0382] (b) at least one target recognition element or any nucleic acid sequence encoding the target recognition element;

[0383] (c) at least one nucleic acid cassette or any vector or vehicle comprising the nucleic acid sequence of (a), the nucleic acid sequence of (b) or the nucleic acid sequence of (a) and (b);

[0384] (d) at least one system comprising (a) and (b);

[0385] (e) at least one host cell modified by, and/or comprising at least one of: (a), (b), (c) and (d); and

[0386] (f) at least one composition comprising at least one of (a), (b), (c), (d) and (e).

[0387] In some embodiments, the methods of the invention may use any of the CRISPR-Cas proteins defined by the invention. In yet some further embodiments, the methods of the invention may use any of the fusion/chimeric protein, complex or conjugate of such Cas protein, specifically, any of the nucleic acid guided genome modifier or effector chimeric protein, complex or conjugate defined by the invention. In more specific embodiments, any of the guided genome modifier/effector chimeric proteins of the invention, specifically the proteins comprising the amino acid sequence as denoted by any one of SEQ ID NO. 2, 14, 15, 16, 17, 24-44, 45-48, 56, 210-213, 271-281, 284 and 288-290, 314-318, 320-323, 330-357, 362-366, and 375-396, 406, 407, 426-438, 440-480, 487-492, may be applicable in the methods of the invention. More particular embodiments refer to the chimeras disclosed by the amino acid sequences as denoted by any one of SEQ ID NO. 2, 375, 444, 448, 467, 476, 478, 479 and 480, or any variants and derivatives thereof. In yet some further embodiments, the methods of the invention may use any of the nucleic acid molecules defined by the invention as disclosed herein. Still further, the methods of the invention may use any of the systems of the invention. Still further, in some embodiments, any of the host cells defined by the invention may be used for the methods of the invention.

[0388] In some embodiments, the methods of the invention may be used for treating any subject of the biological kingdom Animalia or of the biological kingdom Plantae.

[0389] Subject suitable for the invention are Eukaryotic organisms, specifically, any unicellular or multicellular organisms of the Animalia and Plantae biological kingdoms.

[0390] In more specific embodiments, the methods of the invention may be applicable for any subject of the biological kingdom Animalia. It should be understood that an organism of the Animalia kingdom in accordance with the invention includes any invertebrate or vertebrate organism.

[0391] More specifically, Invertebrates are animals that neither possess nor develop a vertebral column (commonly known as a backbone or spine), derived from the notochord. This includes all animals apart from the subphylum Vertebrata. More specifically, invertebrates include the Phylum Porifera—Sponges, the Phylum Cnidaria—Jellyfish, hydras, sea anemones, corals, the Phylum Ctenophora—Comb jellies, the Phylum Platyhelminthes—Flatworms, the Phylum Mollusca—Molluscs, the Phylum Arthropoda—Arthropods, the Phylum Annelida-Segmented worms like earthworm and the Phylum Echinodermata—Echinoderms Familiar examples of invertebrates include insects; crabs, lobsters and their kin; snails, clams, octopuses and their kin; starfish, sea-urchins and their kin; jellyfish and worms.

[0392] In some embodiments the invention may be applicable for any organism of the phylum arthropod that are invertebrate animals having an exoskeleton (external skeleton), a segmented body, and paired jointed appendages. Arthropods form the phylum Euarthropoda, which includes insects, arachnids, myriapods, and crustaceans.

[0393] Insects or Insecta are hexapod invertebrates and the largest group within the arthropod phylum. Definitions and circumscriptions vary; usually, insects comprise a class within the Arthropoda. As used here, the term Insecta is synonymous with Ectognatha. Insects have a chitinous exoskeleton, a three-part body (head, thorax and abdomen), three pairs of jointed legs, compound eyes and one pair of antennae. Insects are the most diverse group of animals; they include more than a million described species and represent more than half of all known living organisms. Insects can be divided into two groups historically treated as subclasses: wingless insects, known as Apterygota, and winged insects, known as Pterygota. The Apterygota consist of the primitively wingless order of the silverfish (Zygentoma). Archaeognatha make up the Monocondylia based on the shape of their mandibles, while Zygentoma and Pterygota are grouped together as Dicondylia. The Zygentoma themselves possibly are not monophyletic, with the family Lepidotrichidae being a sister group to the Dicondylia (Pterygota and the remaining Zygentoma). Paleoptera and Neoptera are the winged orders of insects differentiated by the presence of hardened body parts called sclerites, and in the Neoptera, muscles that allow their wings to fold flatly over the abdomen. Neoptera can further be divided into incomplete metamorphosis-based (Polyneoptera and Paraneoptera) and complete metamorphosis-based groups. It should be noted that the present invention is applicable for any of the insects of any of the groups and species disclosed herein. Still further, many insects are considered pests by humans Insects commonly regarded as pests include those that are parasitic (e.g. lice, bed bugs), transmit diseases (mosquitoes, flies), damage structures (termites), or destroy agricultural goods (locusts, weevils). Insects considered pests of some sort occur among all major living orders with the exception of Ephemeroptera (mayflies), Odonata, Plecoptera (stoneflies), Embioptera (webspinners), Trichoptera (caddisflies), Neuroptera (in the broad sense), and Mecoptera (also, the tiny groups Zoraptera, Grylloblattodea, and Mantophasmatodea). Of particular interest of this group is the Mosquito. More specifically, in some embodiments, the invention may be suitable for insects such as mosquito for example. Mosquitoes are a group of about 3500 species of small insects that are a type of fly (order Diptera). Within that order they constitute the family Culicidae. Superficially, mosquitoes resemble crane flies (family Tipulidae) and chironomid flies (family Chironomidae). It should be appreciated that in some embodiments, the term mosquito, as used herein includes all genera encompassed by the subfamilies Anophelinae and Culicinae. In yet some further embodiments, mosquito as used herein include, but is not limited to any mosquito of the following genera, Aedeomyia, Aedes, Anopheles, Armigeres, Ayurakitia, Borachinda, Coquillettidia, Culex, Culiseta, Deinocerites, Eretmapodites, Ficalbia, Galindomyia, Haemagogus, Heizmannia, Hodgesia, Isostomyia, Johnbelkinia, Kimia, Limatus, Lutzia, Malaya, Mansonia, Maorigoeldia, Mimomyia, Onirion, Opifex, Orthopodomyia, Psorophora, Runchomyia, Sabethes, Shannoniana, Topomyia, Toxorhynchites, Trichoprosopon, Tripteroides, Udaya, Uranotaenia, Verrallina, and Wyeomyia. Females of most species are ectoparasites, whose tube-like mouthparts (called a proboscis) pierce the hosts' skin to consume blood. Though the loss of blood is seldom of any importance to the victim, the saliva of the mosquito often causes an irritating rash that is a serious nuisance. Much more serious though, are the roles of many species of mosquitoes as vectors of diseases. In passing from host to host, some transmit extremely harmful infections such as malaria, yellow fever, Chikungunya, West Nile virus, dengue fever, filariasis, Zika virus and other arboviruses, rendering it the deadliest animal family in the world.

[0394] Of particular interest in some embodiments of the present invention is the bee. Bees are flying insects closely related to wasps and ants, known for their role in pollination and, in the case of the best-known bee species, the western honeybee, for producing honey and beeswax. Bees are a monophyletic lineage within the superfamily Apoidea and are presently considered a Glade, called Anthophila. There are nearly 20,000 known species of bees in seven recognized biological families, specifically, Andrenidae, Apidae, Colletidae, Halictidae, Megachilidae, Melittidae, Stenotritidae. Some species including honeybees, bumblebees, and stingless bees live socially in colonies. It should be understood that the present invention encompasses any of the bee species of any of the bee families indicated herein.

[0395] Still further, the invention may be useful for crustacean organisms. Crustaceans, as used herein, form a large, diverse arthropod taxon which includes crabs, lobsters, crayfish, shrimp, krill, woodlice, and barnacles, that are all encompassed by the present invention. The crustacean group is usually considered as a paraphyletic group and comprises all animals in the Pancrustacea Glade other than hexapods. Some crustaceans are more closely related to insects and other hexapods than they are to certain other crustaceans. In some embodiments, such crustaceans may be shrimp. The term shrimp is used to refer to decapod crustaceans and covers any of the groups with elongated bodies and a primarily swimming mode of locomotion i.e. Caridea and Dendrobranchiata.

[0396] In yet some further embodiments, the invention may be useful for organisms of the subphylum Chelicerata that is one of the major subdivisions of the phylum Arthropoda and includes the sea spiders, arachnids, and several extinct lineages. In more specific embodiments, the invention may be useful for organisms of the Arachnida that are a class including spiders (the largest order in the class), scorpions, Acari (ticks, mites), harvestmen, and solifuges.

[0397] Still further, in some embodiments, the methods of the invention may be applicable for a vertebrate organism. Vertebrates comprise all species of animals within the subphylum Vertebrata (chordates with backbones). The animals of the vertebrates group include Fish, Amphibians, Reptiles, Birds and Mammals (e.g., Marsupials, Primates, Rodents and Cetaceans).

[0398] Vertebrates represent the overwhelming majority of the phylum Chordata, with currently about 66,000 species described. Vertebrates include the jawless fish and the jawed vertebrates, which include the cartilaginous fish (sharks, rays, and ratfish) and the bony fish.

[0399] Still further, in some embodiments, the subject of the invention may be any one of a human or non-human mammal, an avian, an insect, a fish, an amphibian, a reptile, a crustacean, a crab, a lobster, a snail, a clam, an octopus, a starfish, a sea-urchin, jellyfish, and worms.

[0400] In more specific embodiments, the subject of the invention may be a mammal. In yet some further embodiments, such mammalian organisms may include any member of the mammalian nineteen orders, specifically, Order Artiodactyla (even-toed hoofed animals), Order Carnivora (meat-eaters), Order Cetacea (whales and purpoises), Order Chiroptera (bats), Order Dermoptera (colugos or flying lemurs), Order Edentata (toothless mammals), Order Hyracoidae (hyraxes, dassies), Order Insectivora (insect-eaters), Order Lagomorpha (pikas, hares, and rabbits), Order Marsupialia (pouched animals), Order Monotremata (egg-laying mammals), Order Perissodactyla (odd-toed hoofed animals), Order Pholidata, Order Pinnipedia (seals and walruses), Order Primates (primates), Order Proboscidea (elephants), Order Rodentia (gnawing mammals), Order Sirenia (dugongs and manatees), Order Tubulidentata (aardvarks).

[0401] In yet some further embodiments, the invention may be applicable for any organism of the order primates. More specifically, primates are divided into two distinct suborders, the first is the strepsirrhines that includes lemurs, galagos, and lorisids. The second is haplorhines—that includes tarsier, monkey, and ape clades, the last of these including humans. In yet some further embodiments, the invention may be applicable for any organism of the subfamily Homininae, that includes the hylobatidae (gibbons) and the hominidae that includes ponqunae (orangutans) and homininae [gorillini (gorilla) and hominini ((panina(chimpanzees) and hominina (humans))].

[0402] In some specific embodiment, the methods of the invention may be applicable for a mammal that may be at least one of a Cattle, domestic pig (swine, hog), sheep, horse, goat, alpaca, lama and Camels.

[0403] In some embodiments, the invention may be applicable for subject of the Order Artiodactyla, including members of the family Suidae, subfamily SuMae and Genus Sus, and members of the family Bovidae, subfamily Bovinae including ungulates. More specifically, domestic cattle, bison, African buffalo, the water buffalo, the yak. Of particular interest in the present invention are domestic cattle being the most widespread species of the genus Bos and are most commonly classified collectively as Bos taurus.

[0404] More specifically, the subject the invention as well as the methods disclosed herein above offer great economic advantage for any industrial or agricultural use of animals, specifically, livestock. Thus, in some specific embodiments, the invention may be applicable for mammalian livestock, specifically those used for meat, milk and leather industries. Livestock are domesticated animals raised in an agricultural setting to produce labor and commodities such as meat, eggs, milk, fur, leather, and wool. The term includes but is not limited to Cattle, sheep, domestic pig (swine, hog), horse, goat, alpaca, lama and Camels. Of particular interest are cattle applicable in the meat and milk industry, as well as in the leather industry. More specifically, in certain embodiments, the subject of the invention may be Cattle, colloquially cows, that are the most common type of large domesticated ungulates, that belong to the Bovidae family

[0405] Still further, the Bovidae are the biological family of cloven-hoofed, ruminant mammals that includes bison, African buffalo, water buffalo, antelopes, wildebeest, impala, gazelles, sheep, goats, muskoxen. The biological subfamily Bovinae includes a diverse group of ten genera of medium to large-sized ungulates, including domestic cattle, bison, African buffalo, the water buffalo, the yak, and the four-horned and spiral-horned antelopes. Of particular interest in the present invention may be the domestic cattle are the most widespread species of the genus Bos and are most commonly classified collectively as Bos taurus. More specifically, Bos is the genus of wild and domestic cattle. Bos can be divided into four subgenera: Bos, Bibos, Novibos, and Poephagus. Subgenus Bos includes Bos primigenius (cattle, including aurochs), Bos primigenius primigenius (aurochs), Bos primigenius taurus (taurine cattle, domesticated) and Bos primigenius indicus (zebu, domesticated).

[0406] In yet some further embodiments, rodents may be of particular relevance since it represents the most popular and commonly accepted animal model in research.

[0407] Thus, in some further embodiment, the methods of the invention may be applicable for a mammal such as a rodent. Rodents are mammals of the order Rodentia, which are characterized by a single pair of continuously growing incisors in each of the upper and lower jaws. Rodents are the largest group of mammals. Non-limiting examples for such rodents that are applicable in the present invention, appear in the following list of rodents, arranged alphabetically by suborder and family Suborder Anomaluromorpha includes the anomalure family (Anomaluridae) [anomalure (genera Anomalurus, Idiurus, and Zenkerella)], the spring hare family (Pedetidae) [spring hare (Pedetes capensis)]. The suborder Castorimorpha includes the beaver family (Castoridae) [beaver (genus Castor), giant beaver (genus Castoroides; extinct)], the kangaroo mice and rats (family Heteromyidae) [kangaroo mouse (genus Microdipodops), kangaroo rat (genus Dipodomys), pocket mouse (several genera)], the pocket gopher family (Geomyidae) [pocket gopher (multiple genera)]. Suborder Hystricomorpha, includes the agouti family (Dasyproctidae), acouchy (genus Myoprocta) [agouti (genus Dasyprocta)], the American spiny rat family (Echimyidae), the American spiny rat (multiple genera), the blesmol family (Bathyergidae) [blesmol (multiple genera)], the cane rat family (Thryonomyidae) [cane rat (genus Thryonomys)], the cavy family (Caviidae) [capybara (Hydrochoerus hydrochaeris), guinea pig (Cavia porcellus) mara (genus Dolichotis)], the chinchilla family (Chinchillidae) [chinchilla (genus Chinchilla), viscacha (genera Lagidium and Lagostomus)], the chinchilla rat family (Abrocomidae) [chinchilla rat (genera Cuscomys and Abrocoma)], the dassie rat family (Petromuridae) [classic rat (Petromus typicus)], the degu family (Octodontidae) [degu (genus Octodon)], the diatomyid family (Diatomyidae), the giant hutia family (Heptaxodontidae), the gundi family (Ctenodactylidae) [gundi (multiple genera)], the hutia family (Capromyidae) [hutia (multiple genera)], the New World porcupine family (Erethizontidae) [New World porcupine (multiple genera)], the nutria family (Myocastoridae) [nutria (Myocastor coypus)], the Old World porcupine family (Hystricidae) [Old World porcupine (genera Atherurus, Hystrix, and Trichys)], the paca family (Cuniculidae) [paca (genus Cuniculus)], the pacarana family (Dinomyidae) [pacarana (Dinomys branickii)], the tuco-tuco family (Ctenomyidae) [tuco-tuco (genus Ctenomys)]. The suborder Myomorpha that includes the cricetid family (Cricetidae) [American harvest mouse (genus Reithrodontomys), cotton rat (genus Sigmodon), deer mouse (genus Peromyscus), grasshopper mouse (genus Onychomys), hamster (various genera), golden hamster (Mesocricetus auratus), lemming (various genera) maned rat (Lophiomys imhausi), muskrat (genera Neofiber and Ondatra), rice rat (genus Oryzomys), vole (various genera), meadow vole (genus Microtus), woodland vole (Microtus pinetorum), water rat (various genera), woodrat (genus Neotoma), dipodid family (Dipodidae), birch mouse (genus Sicista), jerboa (various genera), jumping mouse (genera Eozapus, Napaeozapus, and Zapus)], the mouselike hamster family (Calomyscidae), the murid family (Muridae) [African spiny mouse (genus Acomys), bandicoot rat (genera Bandicota and Nesokia), cloud rat (genera Phloeomys and Crateromys), gerbil (multiple genera), sand rat (genus Psammomys), mouse (genus Mus), house mouse (Mus musculus), Old World harvest mouse (genus Micromys), Old World rat (genus Rattus), shrew rat (various genera), water rat (genera Hydromys, Crossomys, and Colomys), wood mouse (genus Apodemus)], thenesomyid family (Nesomyidae), African pouched rat (genera Beamys, Cricetomys, and Saccostomus)], the Oriental dormouse family (Platacanthomyidae)[Asian tree mouse (genera Platacanthomys and Typhlomys)], the spalacid family (Spalacidae) [bamboo rat (genera Rhizomys and Cannomys), blind mole rat (genera Nannospalax and Spalax), zokor (genus Myospalax), suborder Sciuromorpha], the dormouse family (Gliridae) [dormouse (various genera), desert dormouse (Selevinia betpakdalaensis)], the mountain beaver family (Aplodontiidae) [mountain beaver (Aplodontia rufa)], the squirrel family (Sciuridae) [chipmunk (genus Tamias), flying squirrel (multiple genera), ground squirrel (multiple genera), suslik (genus Spermophilus), marmot (genus Marmota), groundhog (Marmota monax), prairie dog (genus Cynomys), tree squirrel (multiple genera)]. In yet some further embodiments, the subject of the invention may be a mouse. A mouse, plural mice, is a small rodent characteristically having a pointed snout, small rounded ears, a body-length scaly tail and a high breeding rate. The best known mouse species is the common house mouse (Mus musculus). Species of mice are mostly found in Rodentia and are present throughout the order. Typical mice are found in the genus Mus.

[0408] In yet some further embodiments, the organism applicable in the methods of the invention, may be avian organisms. In yet some further specific embodiments, the invention may be suitable for birds. More specifically, domesticated and undomesticated birds are also suitable organisms for the invention.

[0409] Therefore, in certain embodiments, the avian organism of the invention may be any one of a domesticated and an undomesticated bird. In more specific embodiment, the avian organism may be any one of a poultry or a game bird. In some specific embodiments, the avian organism may be of the order Galliformes which comprise without limitation, chicken, quail, turkey, duck, Gallinacea sp, goose, pheasant and other fowl. The term “avian” relates to any species derived from birds characterized by feathers, toothless beaked jaws, the laying of hard-shelled eggs, a high metabolic rate, a four-chambered heart, and a lightweight but strong skeleton. The term “hen” includes all females of the avian species.

[0410] In yet some further embodiments, the methods of the invention may be applicable for treating mammalian subjects, specifically, human subjects.

[0411] In yet some further embodiments, the methods of the invention may be applicable for treating any pathologic disorder in a subject, specifically, a mammalian subject, specifically, any one of a proliferative disorder, a congenital disorder, an immune-related condition, an inflammatory condition, a metabolic disorder, a disorder caused by a pathogen, an autoimmune disorder, a disorder associated with the expression of a coding or non-coding sequence and an IEM disorder.

[0412] More specifically, in some embodiments, the methods of the invention may be applicable for treating proliferative disorders. Proliferative disorders, such as cancer, may also be classified as genetic disorders or conditions, as they may result from a defect in a single or multiple genes. Some non-limiting examples of cancers that are classified as genetic disorders or conditions are FAP (familial adenomatous polyposis) or HNPCC (hereditary non-polyposis colon cancer) and breast or ovarian cancers that are associated with inherited mutations in either of the tumor suppressor BRCA1 or BRCA2 genes. The latter examples may be classified as polygenic (or chromosomal) genetic disorders. Approximately five to ten percent of cancers are entirely hereditary. Thus, proliferative disorders may also be treated by the methods of the invention.

[0413] More specifically, as used herein to describe the present invention, “proliferative disorder”, “cancer”, “tumor” and “malignancy” all relate equivalently to a hyperplasia of a tissue or organ. If the tissue is a part of the lymphatic or immune systems, malignant cells may include non-solid tumors of circulating cells. Malignancies of other tissues or organs may produce solid tumors. In general, the methods of the present invention may be applicable for treatment of a patient suffering from any one of non-solid and solid tumors. Malignancy, as contemplated in the present invention may be any one of carcinomas, melanomas, lymphomas, leukemias, myeloma and sarcomas.

[0414] Carcinoma as used herein, refers to an invasive malignant tumor consisting of transformed epithelial cells. Alternatively, it refers to a malignant tumor composed of transformed cells of unknown histogenesis, but which possess specific molecular or histological characteristics that are associated with epithelial cells, such as the production of cytokeratins or intercellular bridges. Melanoma as used herein, is a malignant tumor of melanocytes. Melanocytes are cells that produce the dark pigment, melanin, which is responsible for the color of skin. They predominantly occur in skin, but are also found in other parts of the body, including the bowel and the eye. Melanoma can occur in any part of the body that contains melanocytes.

[0415] Leukemia refers to progressive, malignant diseases of the blood-forming organs and is generally characterized by a distorted proliferation and development of leukocytes and their precursors in the blood and bone marrow. Leukemia is generally clinically classified on the basis of (1) the duration and character of the disease-acute or chronic; (2) the type of cell involved; myeloid (myelogenous), lymphoid (lymphogenous), or monocytic; and (3) the increase or non-increase in the number of abnormal cells in the blood-leukemic or aleukemic (subleukemic).

[0416] Sarcoma is a cancer that arises from transformed connective tissue cells. These cells originate from embryonic mesoderm, or middle layer, which forms the bone, cartilage, and fat tissues. This is in contrast to carcinomas, which originate in the epithelium. The epithelium lines the surface of structures throughout the body, and is the origin of cancers in the breast, colon, and pancreas. Myeloma as mentioned herein is a cancer of plasma cells, a type of white blood cell normally responsible for the production of antibodies. Collections of abnormal cells accumulate in bones, where they cause bone lesions, and in the bone marrow where they interfere with the production of normal blood cells. Most cases of myeloma also feature the production of a paraprotein, an abnormal antibody that can cause kidney problems and interferes with the production of normal antibodies leading to immunodeficiency. Hypercalcemia (high calcium levels) is often encountered.

[0417] Lymphoma is a cancer in the lymphatic cells of the immune system. Typically, lymphomas present as a solid tumor of lymphoid cells. These malignant cells often originate in lymph nodes, presenting as an enlargement of the node (a tumor). It can also affect other organs in which case it is referred to as extranodal lymphoma. Non limiting examples for lymphoma include Hodgkin's disease, non-Hodgkin's lymphomas and Burkitt's lymphoma.

[0418] Further malignancies that may find utility in the present invention can comprise but are not limited to hematological malignancies (including lymphoma, leukemia and myeloproliferative disorders, as described above), hypoplastic and aplastic anemia (both virally induced and idiopathic), myelodysplastic syndromes, all types of paraneoplastic syndromes (both immune mediated and idiopathic) and solid tumors (including GI tract, colon, lung, liver, breast, prostate, pancreas and Kaposi's sarcoma. The invention may be applicable as well for the treatment or inhibition of solid tumors such as tumors in lip and oral cavity, pharynx, larynx, paranasal sinuses, major salivary glands, thyroid gland, esophagus, stomach, small intestine, colon, colorectum, anal canal, liver, gallbladder, extraliepatic bile ducts, ampulla of vater, exocrine pancreas, lung, pleural mesothelioma, bone, soft tissue sarcoma, carcinoma and malignant melanoma of the skin, breast, vulva, vagina, cervix uteri, corpus uteri, ovary, fallopian tube, gestational trophoblastic tumors, penis, prostate, testis, kidney, renal pelvis, ureter, urinary bladder, urethra, carcinoma of the eyelid, carcinoma of the conjunctiva, malignant melanoma of the conjunctiva, malignant melanoma of the uvea, retinoblastoma, carcinoma of the lacrimal gland, sarcoma of the orbit, brain, spinal cord, vascular system, hemangiosarcoma and Kaposi's sarcoma. In yet some further embodiments, the methods of the invention may be applicable for any of the proliferative disorders discussed herein. In more specific and non-limiting embodiments, the methods of the invention may be specifically applicable for at least one of non-small cell lung cancer (NSCLC) melanoma, renal cell cancer, ovarian carcinoma and breast carcinoma.

[0419] In some specific embodiments, the methods of the invention may be applicable for treating and curing congenital disorders. A congenital disorder is any one of monogenic or chromosomal or multifactorial.

[0420] As indicated above, the invention provides methods for curing genetic disorders. Specifically, by replacing, mutating, deleting or inserting a sequence into a mal functioning or mutated gene or fragment/s thereof that are associated with the genetic condition using the methods of the invention. A genetic disorder or condition as herein defined is a disease caused by an abnormality in the DNA sequence of an individual. Abnormalities as used herein refer to a small mutation in a single gene. A genetic disorder or condition may be a heritable disorder and as such may be present from before birth. Other genetic disorders or conditions are caused by misregulation of a gene or new mutations or changes to the DNA.

[0421] Based on their genetic contribution, human genetic disorders or conditions can be classified as monogenic (i.e. which involve mutations in a single gene), chromosomal (also referred to as polygenic), or multifactorial genetic diseases. Monogenic diseases are caused by alterations in a single gene.

[0422] A hereditary disease may result unexpectedly when two healthy carriers of a defective recessive gene reproduce but can also happen when the defective gene is dominant.

[0423] The term “mutation” as herein defined refers to a change in the nucleotide sequence of the genome of an organism. This term further encompasses a desired outcome of NHEJ-erroneous repair. Mutations result from unrepaired damage to DNA or to RNA genomes (typically caused by radiation or chemical mutagens), from errors in the process of replication, or from the insertion or deletion of segments of DNA by mobile genetic elements. Mutations may or may not produce observable (phenotypic) changes in the characteristics of an organism. Mutation can result in several different types of change in the DNA sequence; these changes may have no effect, alter the product of a gene, or prevent the gene from functioning properly or completely. There are generally three types of mutations, namely single base substitutions, insertions and deletions and mutations defined as “chromosomal mutations”.

[0424] The term “single base substitutions” as herein defined refers to a single nucleotide base which is replaced by another. These single base changes are also called point mutations. There are two types of base substitutions, namely, “transition” and “transversion”. When a purine base (i.e. Adenosine or Thymine) replaces a purine base or a pyrimidine base (Cytosine, Guanine) replaces a pyrimidine base, the base substitution mutation is termed a “transition”. When a purine base replaces a pyrimidine base or vice-versa, the base substitution is called a “transversion”.

[0425] Single base substitutions may be further classified according to their effect on the genome, as follows:

[0426] In missense mutations the new base alters a codon, resulting in a different amino acid being incorporated into the protein chain. As a non-limiting example, the disease sickle cell anemia is a result of a single base substitution that is a missense mutation. In sickle cell anemia, the 17th nucleotide of the gene for the beta chain of haemoglobin (haem) is mutated from an ‘a’ to a ‘t’. This changes the codon from ‘gag’ to ‘gtg’, resulting in the 6th amino acid of the chain being changed from glutamic acid to Valine. This alteration to the beta globin gene alters the quaternary structure of haemoglobin, which has a profound influence on the physiology and wellbeing of the individual. In nonsense mutations the new base changes a codon that specified an amino acid into one of the stop codons (taa, tag, tga). This will cause translation of the mRNA to stop prematurely and a truncated protein to be produced. This truncated protein will be unlikely to function correctly. Nonsense mutations are the molecular basis for between 15% to 30% of all inherited diseases. Some non-limiting examples include Cystic fibrosis, haemophilia, retinitis pigmentosa and Duchenne muscular dystrophy.

[0427] In silent mutations no change in the final protein product occurs and thus the mutation can only be detected by sequencing the gene. Most amino acids that make up a protein are encoded by several different codons (see genetic code). So, if for example, the third base in the ‘cag’ codon is changed to an ‘a’ to give ‘caa’, a glutamine (Q) would still be incorporated into the protein product, because the mutated codon still codes for the same amino acid. These types of mutations are ‘silent’ and have no detrimental effect.

[0428] Mutation may also arise from insertions of nucleic acids into the DNA or from duplication or deletions of nucleic acids therefrom. As herein defined, the term “insertions and deletions” refers to extra base pairs that are added or deleted from the DNA of a gene, respectively. The number of bases can range from a few to thousands. Insertions and deletions of one or two bases or multiples of one or two bases cause, inter alia, frame shift mutations (i.e. these mutations shift the reading frame of the gene). These can have devastating effects because the mRNA is translated in new groups of three nucleotides and the protein being produced may be useless.

[0429] Insertions and deletions of three or multiples of three bases may be less serious because they preserve the open reading frame. However, a number of trinucleotide repeat diseases exist including, for example, Huntington's disease and fragile X syndrome.

[0430] In Huntington's disease, for example, the repeated trinucleotide is ‘cag’. This adds a string of glutamines to the Huntington protein. The abnormal protein produced interferes with synaptic transmission in parts of the brain leading to involuntary movements and loss of motor control. Genetic disorders (or conditions, diseases) that may be cured by the methods of the invention may be further classified as “recessive” and “dominant” as well as autosomal and X-linked (relating to the chromosome the gene is on).

[0431] The term “Autosomal dominant disorder” as referred to herein encompasses genetic disorders or diseases, in which only one mutated copy of the gene is required for a person to be affected. Each affected person usually has one affected parent. Some non-limiting examples of autosomal dominant genetic diseases are Huntington's disease, Neurofibromatosis 1, and Marfan syndrome.

[0432] The term “autosomal recessive disorder” as referred to herein, encompasses genetic diseases, in which two copies of the gene should be mutated for a person to be affected. An affected person usually has unaffected parents who each carry a single copy of the mutated gene (and are referred to as carriers). Some non-limiting examples of autosomal recessive disorders include Cystic fibrosis, sickle cell anemia, Tay-Sachs disease, spinal muscular atrophy, Sickle-cell disease (SCD) and phenylketonuria (PKU) which is an autosomal recessive metabolic genetic disorder.

[0433] The term “X-linked dominant” as herein defined refers to disorders that are caused by mutations in genes on the X chromosome. Males are more frequently affected than females, and the chance of passing on an X-linked dominant disorder differs between men and women. Some X-linked dominant conditions include, but are not limited to Aicardi Syndrome, and Hypophosphatemia. X-linked disorders may also be classified as “recessive X-linked”. Recessive X-linked disorders as herein defined are also caused by mutations in genes on the X chromosome. Males are more frequently affected than females, and the chance of passing on the disorder differs between men and women. Some non-limiting examples of recessive X-linked disorders are Hemophilia A, Duchenne muscular dystrophy, Color blindness, Muscular dystrophy, Androgenetic alopecia and G-6-PD (Glucose-6-phosphate dehydrogenase) deficiency.

[0434] Genetic disorders may also be Y-linked. The term “Y-linked disorders” as herein defined refers to genetic diseases that are caused by mutations on the Y chromosome. Only males can get them, and all of the sons of an affected father are affected.

[0435] Genetic disorders may also be classified as “Mitochondrial”. The term “Mitochondrial diseases” as herein defined refers to maternal inheritance, and only applies to genes in mitochondrial DNA. Because only egg cells contribute mitochondria to the developing embryo, only females can pass on mitochondrial conditions to their children. A non-limiting example of a mitochondrial genetic disease is Leber's Hereditary Optic Neuropathy (LHON).

[0436] In further embodiments, the genetic disorder may be a multifactorial genetic disease. Examples of multifactorial genetic diseases include, but are not limited to breast and ovarian cancers that are associated with the BRCA1 or BRCA2 gene, Alzheimer's disease, some forms of colon cancer, e.g. familial adenomatous polyposis (FAP) or hereditary non-polyposis colon cancer (HNPCC) as well as hypothyroidism.

[0437] Currently around 4,000 genetic disorders or conditions are known, with more being discovered. Most disorders or conditions are quite rare and affect one person in every several thousands or millions. Interestingly, Cystic fibrosis is one of the most common genetic disorders; around 5% of the population of the United States carry at least one copy of the defective gene.

[0438] The method of the invention may also be used for the treatment of orphan diseases. The term “orphan disease” as herein defined refers to a rare disease, which affects a small percentage of the population. Most rare diseases are genetic, and thus are present throughout the person's entire life, even if symptoms do not immediately appear. Many rare diseases appear early in life, and about 30 percent of children with rare diseases will die before reaching their fifth birthday. A disease may be considered rare in one part of the world, or in a particular group of people, but still be common in another. A rare disease was defined in the Orphan Drug Act of 1983 as one that afflicts fewer than 200,000 people in a nation. According to the National Institute of Health, some non-limiting examples of orphan diseases are Cystic fibrosis, Ataxia telangiectasia and Tay-Sachs, to name but few.

[0439] In some embodiments, the genetic disorder or condition encompassed by the invention is a monogenic genetic disease, which may be, but is not limited to Duchenne muscular dystrophy, Cystic Fibrosis, Tay—Sachs disease (also known as GM2 gangliosidosis or hexosaminidase A deficiency), Ataxia-Telangiectasia (A-T), Sickle-cell disease (SCD), or sickle-cell anemia (SCA or anemia), Lesch—Nyhan syndrome (LNS, also known as Nyhan's syndrome, Amyotrophic Lateral Sclerosis, Cystinosis, Kelley-Seegmiller syndrome and Juvenile gout), color blindness, Haemochromatosis (or haemosiderosis), Haemophilia, Phenylketonuria (PKU), Phenylalanine Hydroxylase Deficiency disease, Polycystic kidney disease (PKD or PCKD, also known as polycystic kidney syndrome), Alpha-galactosidase A deficiency, Fabry disease, Anderson-Fabry disease, Angiokeratoma Corporis Diffusum, CADASIL (cerebral autosomal dominant arteriopathy with subcortical infarcts and leukoencephalopathy), Cerebral arteriopathy with subcortical infarcts and leukoencephalopathy, Cerebral autosomal dominant ateriopathy with subcortical infarcts and leukoencephalopathy, Carboxylase Deficiency, Multiple (Late-Onset), Cerebroside Lipidosis syndrome, Gaucher's disease, Choreoathetosis self-mutilation hyperuricemia syndrome, Classic Galactosemia, Galactosemia, Crohn's disease, also known as Crohn syndrome and regional enteritis, Incontinentia Pigmenti (also known as “Bloch-Siemens syndrome,” “Bloch-Sulzberger disease,” “Bloch-Sulzberger syndrome” “melanoblastosis cutis,” and “naevus pigmentosus systematicus”), galactosemia Microcephaly, alpha-1 antitrypsin deficiency (Alpha-1), Adenosine deaminase (ADA) deficiency, Severe Combined Immunodeficiency (SCID), neurofibromatosis type 1 (NF1), Wiskott—Aldrich syndrome, Stargardt macular degeneration, Fanconi' s anemia, Spinal muscular atrophy (SMA) and Leber's congenital amaurosis (LCA).

[0440] In other embodiments non-hereditary diseases such as autoimmune diseases are particularly applicable for curing via knockout or downregulation of the auto-antigen by using the method or system of the invention.

[0441] In some specific embodiments, the methods of the invention may be applicable for treatment and/or curing of RP.

[0442] Retinitis pigmentosa (RP) is an inherited dystrophic or degenerative disease of the retina with a prevalence of roughly one in 4,000. Typically, the disease progresses from the midperiphery of the retina into the central retina and, in many cases, into the macula and fovea. Clinical features include night blindness starting in adolescence, followed by progressive loss of peripheral vision, referred to as “tunnel vision”, culminating in legal blindness or complete blindness in adulthood. Characteristic retinal findings on examination include bone-spicule formations and attenuated blood vessels, reduced visual fields, reduced and/or abnormal electroretinograms (ERGs), changes in structure imaged by optical coherence tomography (OCT), and subjective changes in visual function. However, features and findings are highly variable among patients, even among patients within the same family Currently, there are no effective treatments for RP.

[0443] The invention is applicable for all modes of inheritance are encountered, specifically, dominant, recessive, autosomal, X-linked, and even mitochondrial. adRP accounts for 25%-30% of the cases. It is assumed that each patient has a monogenic form of disease (or digenic in rare cases) but many different genes account for disease in RP patients as a group.

[0444] Finding genes and mutations causing adRP: for autosomal dominant diseases, the problems are compounded by the need to detect a single, heterozygous mutation in a diploid organism, the proverbial needle-in a-hay-stack. Clinical evaluation, NGS, segregation testing and linkage analysis are performed. It should be noted that the prevalence of adRP is around 1:15,000.

[0445] An accurate diagnosis of retinitis pigmentosa relies on the documentation of the progressive loss photoreceptor cell function, confirmed by a combination of visual field and visual acuity tests, fundus and optical coherence imagery, and electroretinography (ERG). The patient's family history is also considered due to the mode of inheritance. Clinical findings include night blindness or nyctalopia, Tunnel vision (due to loss of peripheral vision), Latticework vision, Photopsia (blinking/shimmering lights), Photophobia (Aversion to glare), Development of bone spicules in the fundus, Slow adjustment from dark to light environments and vice versa, Blurring of vision, Poor color separation, Loss of central vision and Eventual blindness.

[0446] In yet some further embodiments, the methods of the invention may be applicable for treating and curing PSACH. Pseudoachondroplasia (PSACH) is a skeletal dysplasia characterized by disproportionate short stature, small hands and feet, abnormal joints and early onset osteoarthritis. PSACH is caused by mutations in thrombospondin 5 (TSP-5, also known as cartilage oligomeric matrix protein or COMP), a pentameric extracellular matrix protein primarily expressed in chondrocytes and musculoskeletal tissues. The thrombospondin gene family is composed of matricellular proteins that associate with the extracellular matrix (ECM) and regulate processes in the matrix. Mutations in COMP interfere with calcium-binding, protein conformation and export to the extracellular matrix, resulting in inappropriate intracellular COMP retention. This accumulation of misfolded protein is cytotoxic and triggers premature death of chondrocytes during linear bone growth, leading to shortened long bones. Both in vitro and in vivo models have been employed to study the molecular processes underlying development of the PSACH pathology.

[0447] While PSACH is a rare disorder with an estimated birth prevalence of approximately 1/30,000 (www.orpha.net), the exact birth prevalence is not known since PSACH newborns are indistinguishable from other babies at birth.

[0448] PSACH is an autosomal dominant disorder that occurs as a (de novo) new event in 70-80% of families with the remaining cases being inherited from an affected parent.

[0449] The diagnosis of pseudoachondroplasia can be made on the basis of clinical findings and radiographic features. Identification of a heterozygous pathogenic variant in COMP on molecular genetic testing establishes the diagnosis if clinical features are inconclusive.

[0450] Pseudoachondroplasia is one of the most common skeletal dysplasias affecting all racial groups. However, no precise incidence figures are currently available.

[0451] Clinical findings include: Normal length at birth, Normal facies, Waddling gait, recognized at the onset of walking, Decline in growth rate to below the standard growth curve by approximately age two years, leading to moderately severe disproportionate short-limb short stature, Moderate brachydactyly, Ligamentous laxity and joint hyperextensibility, particularly in the hands, knees, and ankles, Mild myopathy reported for some individuals, Restricted extension at the elbows and hips, Valgus, varus, or windswept deformity of the lower limbs, Mild scoliosis, Lumbar lordosis (˜50% of affected individuals), Joint pain during childhood, particularly in the large joints of the lower extremities; may be the presenting symptom in mildly affected individuals.

[0452] Radiographic features include: Delayed epiphyseal ossification with irregular epiphyses and metaphyses of the long bones (consistent), Small capital femoral epiphyses, short femoral necks, and irregular, flared metaphyseal borders; small pelvis and poorly modeled acetabulae with irregular margins that may be sclerotic, especially in older individuals, Significant brachydactyly; short metacarpals and phalanges that show small or cone shaped epiphyses and irregular metaphyses; small, irregular carpal bones, Anterior beaking or tonguing of the vertebral bodies on lateral view. This distinctive appearance of the vertebrae normalizes with age, emphasizing the importance of obtaining in childhood the radiographs to be used in diagnosis.

[0453] In some specific embodiments, the methods of the invention may be applicable for treating and curing a MPO-related condition. In some embodiments, the MPO-related condition may be an immune-related disorder. An “Immune-related disorder” or “Immune-mediated disorder”, as used herein encompasses any condition that is associated with the immune system of a subject, more specifically through inhibition or the activation of the immune system, or that can be treated, prevented or ameliorated by reducing degradation of a certain component of the immune response in a subject, such as the adaptive or innate immune response. An immune-related disorder may include infectious condition (e.g., viral infections), metabolic disorders, auto-immune disorders, vasculitis, inflammation and proliferative disorders, specifically, cancer. In some embodiments, the immune-related disorder may be an autoimmune disease. In accordance with some embodiments, the methods of the invention are applicable in treating autoimmune disorders. An autoimmune disease is a condition arising from an abnormal immune response to a normal body part. Examples of an autoimmune disorder include Rheumatoid arthritis (RA), Multiple sclerosis (MS), Systemic lupus erythematosus (lupus), Type 1 diabetes, Psoriasis/psoriatic arthritis, Inflammatory bowel disease including Crohn's disease and Ulcerative colitis, and Vasculitis.

[0454] In some specific embodiments, the methods of the invention may be particularly applicable for autoimmune disorder such as multiple sclerosis (MS), Anti-neutrophil cytoplasmic antibodies (ANCAs)—related disorder, and systemic lupus erythematosus (SLE).

[0455] In some embodiments, the methods of the invention may be applicable for the treatment of MS and any related conditions or symptoms associated therewith. The term “Multiple Sclerosis” (MS) as herein defined is a chronic inflammatory neurodegenerative disease of the central nervous system that destroys myelin, oligodendrocytes and axons. MS is the most common neurological disease among young adults, typically appearing between the ages of 20 and 40. The symptoms of MS vary, from the appearance of visual disturbance such as visual loss in one eye, double vision to muscle weakness fatigue, pain, numbness, stiffness and unsteadiness, loss of coordination and other symptoms such as tremors, dizziness, slurred speech, trouble swallowing, and emotional disturbances. As the disease progresses patients may lose their ambulation capabilities, may encounter cognitive decline, loss of self-managing of everyday activities and may become severely disabled and dependent.

[0456] MS symptoms develop because immune system elements attack the brain's cells, specifically, glia and /or neurons, and damage the protective myelin sheath of axons. The areas in which these attacks occur are called lesions that disrupt the transmission of messages through the brain. Multiple sclerosis is classified into four types, characterized by disease progression: (1) Relapsing-remitting MS (RRMS), which is characterized by relapse (attacks of symptom flare-ups) followed by remission (periods of stabilization and possible recovery; while in some remissions there is full recovery, in other remissions there is partial or no recovery). Symptoms of RRMS may vary from mild to severe, and relapses may last for days or months. More than 80 percent of people who have MS begin with relapsing-remitting cycles; (2) Secondary-progressive MS (SPMS) develops in people who have relapsing-remitting MS. In SPMS, relapses may occur, but there is no remission (stabilization) for a meaningful period of time and the disability progressively worsens; (3) Primary-progressive MS (PPMS), which progresses slowly and steadily from its onset and accounts for less than 20 percent of MS cases. There are no periods of remission, and symptoms generally do not decrease in intensity; and (4) Progressive-relapsing MS (PRMS). In this type of MS, people experience both steadily worsening symptoms and attacks during periods of remission. It should be understood that the method of the invention may be applicable for any type, stage or condition of the MS patient. Treatment using the methods of the invention may result in some embodiments in alleviation of any symptoms, and/or in prolonging the remission period between attacks.

[0457] In yet some further embodiments, the methods of the invention may be applicable for the treatment of SLE and any related conditions or symptoms associated therewith. More specifically, Systemic lupus erythematosus (SLE), also known simply as lupus, is an autoimmune disease. Symptoms vary between people and may be mild to severe. Common symptoms include painful and swollen joints, fever, chest pain, hair loss, mouth ulcers, swollen lymph nodes, feeling tired, and a red rash which is most commonly on the face. The disease is characterized by periods of illness, called flares, and periods of remission during which there are few symptoms.

[0458] The cause of SLE is not clear, however, is thought to involve genetics together with environmental factors. There are a number of other types of lupus erythematosus including discoid lupus erythematosus, neonatal lupus, and subacute cutaneous lupus erythematosus. It should be appreciated that the invention encompasses each of these types.

[0459] Still further, in some embodiments, the methods of the invention may be relevant for other auto immune disorders. For example, for the treatment of ANCA-associated disorders. Anti-neutrophil cytoplasmic antibodies (ANCAs), as used herein, include the perinuclear anti-neutrophil cytoplasmic antibodies (P-ANCA) that target mostly the MPO or EGPA, and are therefore also known as MPO-ANCA, Cytoplasmic anti-neutrophil cytoplasmic antibodies (c-ANCAs), that mostly target the proteinase 3 (PR3) protein and therefore are also known as PR3-ANCA, which is mostly associated with GPA, and atypical ANCA (a-ANCA), also known as x-ANCA, and are a group of autoantibodies, mainly of the IgG type, directed against antigens in the cytoplasm of neutrophil granulocytes (the most common type of white blood cell) and monocytes. p-ANCA is also associated with several medical conditions, it is fairly specific, but not sensitive for ulcerative colitis; a majority of primary sclerosing cholangitis; focal necrotizing and crescentic glomerulonephritis; and rheumatoid arthritis.

[0460] In some embodiments, the methods of the invention may be applicable for any ANCA-related or associated disorders. More specifically, such disorders include, but are not limited to ANCA-associated vasculitides (AAV), ANCA-associated glomerulonephritis (AAGN), crescentic glomerulonephritis (NCGN), and Rapidly progressive glomerulonephritis (RPGN).

[0461] In some further embodiments, the methods of the invention may be applicable for treating immune-related disorder such as an inflammatory disorder. In accordance with some embodiments, the methods of the invention are applicable in treating an inflammatory disorder. The terms “inflammatory disease” or “inflammatory-associated condition” refers to any disease or pathologically condition which can benefit from the reduction of at least one inflammatory parameter, for example, induction of an inflammatory cytokine such as IFN-gamma and IL-2 and reduction in IL-6 levels. The condition may be caused (primarily) from inflammation, or inflammation may be one of the manifestations of the diseases caused by another physiological cause. In some embodiments, an inflammatory disease that may be applicable for the methods of the invention may be any one of atherosclerosis, Rheumatoid arthritis (RA) and inflammatory bowel disease (IBD).

[0462] In yet some further embodiments, the MPO-related condition may be a neurodegenerative disorder. In some specific embodiments, the methods of the invention are applicable in treating a neurodegenerative disorder. In some embodiments, the neurodegenerative disorder may further involve inflammatory and/or vascular causes. Neurodegeneration is the umbrella term for the progressive loss of structure or function of neurons, including synaptic dysfunction and death of neurons. Many neurodegenerative diseases including Alzheimer's and Parkinson's are associated with neurodegenerative processes. Other examples of neurodegeneration that may be also applicable herein may include Friedreich's ataxia, Lewy body disease, spinal muscular atrophy, multiple sclerosis, frontotemporal dementia, corticobasal degeneration, progressive supranuclear palsy, multiple system atrophy, hereditary spastic paraparesis, amyloidosis, Amyotrophic lateral sclerosis (ALS), and Charcot Marie Tooth. It should not be overlooked that normal aging processes include progressive neurodegeneration, specifically, age-related cognitive decline (ACD) and mild cognitive impairment (MCI) are also applicable in the present invention.

[0463] In more specific embodiments, the methods of the invention may be applicable for treating a neurodegenerative disorder such as Alzheimer's disease or Parkinson's disease.

[0464] Alzheimer's disease (AD), as used herein refers to a disorder that involves deterioration of memory and other cognitive domains that in general leads to death within 3 to 9 years after diagnosis. The principal risk factor for Alzheimer's disease is age. The incidence of the disease doubles every 5 years after 65 years of age. Up to 5% of people with the disease have early onset AD (also known as younger-onset), that may appear at 40 or 50 years of age. Many molecular lesions have been detected in Alzheimer' s disease, but the overarching theme to emerge from the data is that an accumulation of misfolded proteins in the aging brain results in oxidative and inflammatory damage, which in turn leads to energy failure and synaptic dysfunction. More specifically, accumulation of Aβ within has been shown in structurally damaged mitochondria isolated from the brains of patients with Alzheimer' s disease.

[0465] Alzheimer's disease may be primarily a disorder of synaptic failure. Hippocampal synapses begin to decline in patients with mild cognitive impairment (a limited cognitive deficit often preceding dementia) in whom remaining synaptic profiles show compensatory increases in size. In mild Alzheimer's disease, there is a reduction of about 25% in the presynaptic vesicle protein synaptophysin. With advancing disease, synapses are disproportionately lost relative to neurons, and this loss is the best correlate with dementia. Aging itself causes synaptic loss, which particularly affects the dentate region of the hippocampus.

[0466] There is no single linear known chain of events or pathways that could initiate and drive Alzheimer's disease. AD is a progressive disease, where dementia symptoms gradually worsen over a number of years. In its early stages, memory loss is mild, but with late-stage AD, individuals lose the ability to carry on a conversation and respond to their environment. Those with AD live an average of eight years after their symptoms become noticeable to others, but survival can range up to 20 years, depending on age and other health conditions.

[0467] The most common early symptom of AD is difficulty remembering newly learned information because AD changes typically begin in the part of the brain that affects learning and memory. As AD advances through the brain it leads to increasingly severe symptoms, including disorientation, mood and behavior changes; deepening confusion about events, time and place; unfounded suspicions about family, friends and professional caregivers; more serious memory loss and behavior changes; and difficulty speaking, swallowing and walking.

[0468] The National Institute of Neurological and Communicative Disorders and Stroke (NINCDS) and the Alzheimer's Disease and Related Disorders Association (ADRDA, now known as the Alzheimer's Association) established the most commonly used NINCDS-ADRDA Alzheimer's Criteria for diagnosis in 1984, extensively updated in 2007. These criteria require that the presence of cognitive impairment, and a suspected dementia syndrome, be confirmed by neuropsychological testing for a clinical diagnosis of possible or probable AD. A histopathologic confirmation including a microscopic examination of brain tissue is required for a definitive diagnosis. Good statistical reliability and validity have been shown between the diagnostic criteria and definitive histopathological confirmation. Eight cognitive domains are most commonly impaired in AD: memory, language, perceptual skills, attention, constructive abilities, orientation, problem solving and functional abilities. These domains are equivalent to the NINCDS-ADRDA Alzheimer's Criteria as listed in the Diagnostic and Statistical Manual of Mental Disorders (DSM-IV-TR) published by the American Psychiatric Association. Beside symptomatic treatments to temporarily slow the worsening of dementia symptoms, AD has no current cure, and the current treatments cannot stop AD from progressing. It should be understood that the methods of the invention may be applicable for any stage, condition or symptom associated with AD, of any of the MPO-related conditions discussed herein.

[0469] In some embodiments, the target sequence targeted by the gene editing systems provided by the invention may be any sequence encoding receptors for antigen derived from a pathogen specifically, viral, bacterial, fungal, parasitic pathogen and the like. Thus, in some embodiments, the therapeutic methods of the invention may be applicable for any condition caused by at least one pathogen. More specifically, any immune-related disorder or condition that may be a pathologic condition caused by any of the pathogens disclosed by the invention, for example, an infectious disease caused by a pathogenic agent, specifically, a viral, bacterial, fungal, parasitic pathogen and the like. Pathogenic agents include prokaryotic microorganisms, lower eukaryotic microorganisms, complex eukaryotic organisms, viruses, fungi, prions, parasites, yeasts, toxins and venoms. Still further, in some embodiments, the methods of the invention may be applicable for disorders caused by a viral pathogen. A viral pathogen, as used herein, may be in some embodiments, of any of the following orders, specifically, Herpesvirales (large eukaryotic dsDNA viruses), Ligamenvirales (linear, dsDNA (group I) archaean viruses), Mononegavirales (include nonsegmented (−) strand ssRNA (Group V) plant and animal viruses), Nidovirales (composed of (+) strand ssRNA (Group IV) viruses), Ortervirales (single-stranded RNA and DNA viruses that replicate through a DNA intermediate (Groups VI and VII)), Picornavirales (small (+) strand ssRNA viruses that infect a variety of plant, insect and animal hosts), Tymovirales (monopartite (+) ssRNA viruses), Bunyavirales contain tripartite (−) ssRNA viruses (Group V) and Caudovirales (tailed dsDNA (group I) bacteriophages). In yet some more specific embodiments, the methods of the invention may be applicable for a viral disorder such as a Foot and Mouth Disease.

[0470] In yet some other specific embodiments, the methods and composition of the invention may be applicable for treating an infectious disease caused by bacterial pathogens. More specifically, a prokaryotic microorganism includes bacteria such as Gram positive, Gram negative and Gram variable bacteria and intracellular bacteria. Examples of bacteria contemplated herein include the species of the genera Treponema sp., Borrelia sp., Neisseria sp., Legionella sp., Bordetella sp., Escherichia sp., Salmonella sp., Shigella sp., Klebsiella sp., Yersinia sp., Vibrio sp., Hemophilus sp., Rickettsia sp., Chlamydia sp., Mycoplasma sp., Staphylococcus sp., Streptococcus sp., Bacillus sp., Clostridium sp., Corynebacterium sp., Proprionibacterium sp., Mycobacterium sp., Ureaplasma sp. and Listeria sp.

[0471] Particular species include Treponema pallidum, Borrelia burgdorferi, Neisseria gonorrhea, Neisseria meningitidis, Legionella pneumophila, Bordetella pertussis, Escherichia coli, Salmonella typhi, Salmonella typhimurium, Shigella dysenteriae, Klebsiella pneumoniae, Yersinia pestis, Vibrio cholerae, Hemophilus influenzae, Rickettsia rickettsii, Chlamydia trachomatis, Mycoplasma pneumoniae, Staphylococcus aureus, Streptococcus pneumoniae, Streptococcus pyogenes, Bacillus anthracis, Clostridium botulinum, Clostridium tetani, Clostridium perfringens, Corynebacterium diphtheriae, Proprionibacterium acnes, Mycobacterium tuberculosis, Mycobacterium leprae and Listeria monocytogenes.

[0472] A lower eukaryotic organism includes a yeast or fungus such as but not limited to Pneumocystis carinii, Candida albicans, Aspergillus, Histoplasma capsulatum, Blastomyces dermatitidis, Cryptococcus neoformans, Trichophyton and Microsporum, are also encompassed by the invention.

[0473] A complex eukaryotic organism includes worms, insects, arachnids, nematodes, aemobe, Entamoeba histolytica, Giardia lamblia, Trichomonas vaginalis, Trypanosoma brucei gambiense, Trypanosoma cruzi, Balantidium coli, Toxoplasma gondii, Cryptosporidium or Leishmania.

[0474] More specifically, in certain embodiments the methods and compositions of the invention may be suitable for treating disorders caused by fungal pathogens. The term “fungi” (or a “fungus”), as used herein, refers to a division of eukaryotic organisms that grow in irregular masses, without roots, stems, or leaves, and are devoid of chlorophyll or other pigments capable of photosynthesis. Each organism (thallus) is unicellular to filamentous and possess branched somatic structures (hyphae) surrounded by cell walls containing glucan or chitin or both, and containing true nuclei. It should be noted that “fungi” includes for example, fungi that cause diseases such as ringworm, histoplasmosis, blastomycosis, aspergillosis, cryptococcosis, sporotrichosis, coccidioidomycosis, paracoccidio-idoinycosis, and candidiasis.

[0475] As noted above, the present invention also provides for the methods and compositions for the treatment of a pathological disorder caused by “parasitic protozoan”, which refers to organisms formerly classified in the Kingdom “protozoa”. They include organisms classified in Amoebozoa, Excavata and Chromalveolata. Examples include Entamoeba histolytica, Plasmodium (some of which cause malaria), and Giardia lamblia. The term parasite includes, but not limited to, infections caused by somatic tapeworms, blood flukes, tissue roundworms, ameba, and Plasmodium, Trypanosoma, Leishmania, and Toxoplasma species.

[0476] As used herein, the term “nematode” refers to roundworms. Roundworms have tubular digestive systems with openings at both ends. Some examples of nematodes include, but are not limited to, basal order Monhysterida, the classes Dorylaimea, Enoplea and Secernentea and the “Chromadorea” assemblage.

[0477] In yet some further specific embodiments, the present invention provides compositions and methods for use in the treatment, prevention, amelioration or delay the onset of a pathological disorder, wherein said pathological disorder is a result of a prion. As used herein, the term “prion” refers to an infectious agent composed of protein in a misfolded form. Prions are responsible for the transmissible spongiform encephalopathies in a variety of mammals, including bovine spongiform encephalopathy (BSE, also known as “mad cow disease”) in cattle and Creutzfeldt-Jakob disease (CJD) in humans. All known prion diseases affect the structure of the brain or other neural tissue and all are currently untreatable and universally fatal.

[0478] It should be appreciated that an infectious disease as used herein also encompasses any pathologic condition caused by toxins and venoms.

[0479] In yet some particular and non-limiting embodiments, the methods of the invention may be applicable for congenital disorders, for example any one of adRP or PSACH. In yet some further embodiments, the methods of the invention may be applicable for any proliferative disorder, specifically for at least one of non-small cell lung cancer (NSCLC) melanoma, renal cell cancer, ovarian carcinoma and breast carcinoma. Still further, in some specific embodiments, the methods of the invention may be applicable for any disorder caused by a pathogen, for example, a viral disorder. In yet some more specific embodiments, the methods of the invention may be applicable for a viral disorder such as a Foot and Mouth Disease.

[0480] It should be appreciated that the methods of the invention enable in vivo editing of a target nucleic acid sequence of interest in cells of the treated subjects, by administering to the treated subject the PAM abolished or reduced CRISPR-Cas proteins of the invention, any chimeric proteins thereof, complex, conjugate, systems and/or any nucleic acid molecules encoding the Cas proteins of the invention or any chimeras thereof. However, in some alternative embodiments, the desired editing of the target nucleic acid sequence, may be performed ex vivo. In such option, the editing, or genetic manipulation of the nucleic acid sequence of interest is performed in cells of an autologous or allogeneic source, that are then administered to the subject.

[0481] Thus, in some embodiments, the methods of the invention may involve the step of administering to the treated subject an effective amount of a cell that comprises the PAM-reduced or abolished Cas-protein of the invention and any fusion protein modifier or effector thereof, or a cell that has been modified by the modifier of the invention and any fusion protein modifier or effector thereof. In some embodiments, such cell has been ex vivo modified using the systems of the invention. Thus, in some embodiments thereof, the methods of the invention may comprise the step of administering to the treated subject a therapeutically effective amount of at least one cell as defined by the invention or of any composition comprising any of the cells disclosed by the invention.

[0482] Still further, in some embodiments, the cells may be of an autologous or allogeneic source.

[0483] In some embodiments, the “host cells” provided herein, specifically, the cells transduced or transfected with or comprising the PAM-reduced or abolished Cas protein or the nucleic acid guided genome modifier/effector chimeric protein, complex or conjugate of the invention, and any systems thereof, and/or the encoding nucleic acid molecules provided by the invention, may be cells of an autologous source. The term “autologous” when relating to the source of cells, refers to cells derived or transferred from the same subject that is to be treated by the method of the invention.

[0484] In yet some further embodiments, the cells transduced or transfected with the PAM abolished or reduced CRISPR-Cas proteins of the invention, any chimeric proteins thereof, systems and/or nucleic acid molecules of the invention used by the methods of the invention may be cells of an allogeneic source, or even of a syngeneic source.

[0485] The term “allogeneic” when relating to the source of cells, refers to cells derived or transferred from a different subject, referred to herein as a donor, of the same species. The term “syngeneic” when relating to the source of cells, refers to cells derived or transferred from a genetically identical, or sufficiently identical and immunologically compatible subject (e.g., an identical twin). The methods of the invention may be useful for mutating, deleting, inserting or replacing a target nucleic acid sequence of interest (e.g., a coding or non-coding sequence) or any fragment thereof in a eukaryotic cell, with a replacement sequence provided by the invention, using recombination or NHEJ. There are several types of eukaryotic cells that may be used by the methods of the invention. By way of example, eukaryotic cells may be, but are not limited to, stem cells, e.g. hematopoietic stem cells (HSCs), embryonic stem cells, totipotent stem cells, pluripotent stem cells or induced pluripotent stem cells, multipotent progenitor cells and plant cells.

[0486] Stem cells are generally known for their three unique characteristics: (i) they have the unique ability to renew themselves continuously; (ii) they have the ability to differentiate into somatic cell types; and (iii) they have the ability to limit their own population into a small number. In mammals, there are two broad types of stem cells, namely embryonic stem cells (ESCs), and adult stem cells. Stem cells may be autologous or heterologous to the subject. In order to avoid rejection of the cells by the subject's immune system, autologous stem cells are usually preferred.

[0487] Thus, in some embodiments, the eukaryotic cells according to the invention may be embryonic stem cells, or human embryonic stem cells (hESCs), that were obtained from self-umbilical cord blood just after birth. Embryonic stem cells are pluripotent stem cells derived from the early embryo that are characterized by the ability to proliferate over prolonged periods of culture while remaining undifferentiated and maintaining a stable karyotype, with the potential to differentiate into derivatives of all three germ layers. hESCs may be also derived from the inner cell mass (ICM) of the blastocyst stage (100-200 cells) of embryos generated by in vitro fertilization. However, methods have been developed to derive hESCs from the late morula stage (30-40 cells) and, recently, from arrested embryos (16-24 cells incapable of further development) and single blastomeres isolated from 8-cell embryos.

[0488] In further embodiments, the eukaryotic cells according to the invention are totipotent stem cells. Totipotent stem cells are versatile stem cells, and have the potential to give rise to any and all human cells, such as brain, liver, blood or heart cells or to an entire functional organism (e.g. the cell resulting from a fertilized egg). The first few cell divisions in embryonic development produce more totipotent cells. After four days of embryonic cell division, the cells begin to specialize into pluripotent stem cells. Embryonic stem cells may also be referred to as totipotent stem cells.

[0489] In further embodiments, the eukaryotic cells according to the invention are pluripotent stem cells. Similar to totipotent stem cells, a pluripotent stem cell refers to a stem cell that has the potential to differentiate into any of the three germ layers: endoderm (interior stomach lining, gastrointestinal tract, the lungs), mesoderm (muscle, bone, blood, urogenital), or ectoderm (epidermal tissues and nervous system). Pluripotent stem cells can give rise to any fetal or adult cell type. However, unlike totipotent stem cells, they cannot give rise to an entire organism. On the fourth day of development, the embryo forms into two layers, an outer layer which will become the placenta, and an inner mass which will form the tissues of the developing human body. These inner cells are referred to as pluripotent cells.

[0490] In still further embodiments, the eukaryotic cells that may be applicable for therapeutic methods according to the invention, are multipotent progenitor cells. Multipotent progenitor cells have the potential to give rise to a limited number of lineages. As a non-limiting example, a multipotent progenitor stem cell may be a hematopoietic cell, which is a blood stem cell that can develop into several types of blood cells but cannot into other types of cells. Another example is the mesenchymal stem cell, which can differentiate into osteoblasts, chondrocytes, and adipocytes. Multipotent progenitor cells may be obtained by any method known to a person skilled in the art.

[0491] In yet further embodiments, the eukaryotic cells according to the invention are induced pluripotent stem cells. Induced pluripotent stem cells, commonly abbreviated as iPS cells are a type of pluripotent stem cell artificially derived from a non-pluripotent cell, typically an adult somatic cell, even a patient's own. Such cells can be induced to become pluripotent stem cells with apparently all the properties of hESCs. Induction requires only the delivery of four transcription factors found in embryos to reverse years of life as an adult cell back to an embryo-like cell. For example, iPS cells could be used for autologous transplantation in a patient with a rare disease. The mutation or mutations responsible for the patient's disease state could be corrected ex vivo in the iPS cells obtained from the patient as performed by the methods of the invention and the cells may be then implanted back into the patient (i.e. autologous transplantation).

[0492] It should be understood that any of the cells disclosed herein may be used by the methods of the invention for ex vivo therapy as disclosed above.

[0493] As described herein above, the invention provides in some aspects thereof therapeutic and prophylactic methods.

[0494] It is to be understood that the terms “treat”, “treating”, “treatment” or forms thereof, as used herein, mean curing, preventing, ameliorating or delaying the onset of one or more clinical indications of disease activity in a subject having a pathologic disorder. Treatment refers to therapeutic treatment. Those in need of treatment are subjects suffering from a pathologic disorder. Specifically, providing a “preventive treatment” (to prevent) or a “prophylactic treatment” is acting in a protective manner, to defend against or prevent something, especially a condition or disease.

[0495] The term “treatment or prevention” as used herein, refers to the complete range of therapeutically positive effects of administrating to a subject including inhibition, reduction of, alleviation of, and relief from, an immune-related condition and illness, immune-related symptoms or undesired side effects or immune-related disorders. More specifically, treatment or prevention of relapse or recurrence of the disease, includes the prevention or postponement of development of the disease, prevention or postponement of development of symptoms and/or a reduction in the severity of such symptoms that will or are expected to develop. These further include ameliorating existing symptoms, preventing-additional symptoms and ameliorating or preventing the underlying metabolic causes of symptoms. It should be appreciated that the terms “inhibition”, “moderation”, “reduction”, “decrease” or “attenuation”, “prevention”, “suppression”, “repression”, “elimination” as referred to herein, relate to the retardation, restraining or reduction of a process by any one of about 1% to 99.9%, specifically, about 1% to about 5%, about 5% to 10%, about 10% to 15%, about 15% to 20%, about 20% to 25%, about 25% to 30%, about 30% to 35%, about 35% to 40%, about 40% to 45%, about 45% to 50%, about 50% to 55%, about 55% to 60%, about 60% to 65%, about 65% to 70%, about 75% to 80%, about 80% to 85% about 85% to 90%, about 90% to 95%, about 95% to 99%, or about 99% to 99.9%, 100% or more.

[0496] With regards to the above, it is to be understood that, where provided, percentage values such as, for example, 10%, 50%, 120%, 500%, etc., are interchangeable with “fold change” values, i.e., 0.1, 0.5, 1.2, 5, etc., respectively.

[0497] The term “amelioration” as referred to herein, relates to a decrease in the symptoms, and improvement in a subject's condition brought about by the compositions and methods according to the invention, wherein said improvement may be manifested in the forms of inhibition of pathologic processes associated with the immune-related disorders described herein, a significant reduction in their magnitude, or an improvement in a diseased subject physiological state.

[0498] The term “inhibit” and all variations of this term is intended to encompass the restriction or prohibition of the progress and exacerbation of pathologic symptoms or a pathologic process progress, said pathologic process symptoms or process are associated with.

[0499] The term “eliminate” relates to the substantial eradication or removal of the pathologic symptoms and possibly pathologic etiology, optionally, according to the methods of the invention described herein.

[0500] The terms “delay”, “delaying the onset”, “retard” and all variations thereof are intended to encompass the slowing of the progress and/or exacerbation of a disorder associated with the immune-related disorders and their symptoms slowing their progress, further exacerbation or development, so as to appear later than in the absence of the treatment according to the invention. As indicated above, the methods and compositions provided by the present invention may be used for the treatment of a “pathological disorder”, specifically, immune-related disorders as specified by the invention, which refers to a condition, in which there is a disturbance of normal functioning, any abnormal condition of the body or mind that causes discomfort, dysfunction, or distress to the person affected or those in contact with that person. It should be noted that the terms “disease”, “disorder”, “condition” and “illness”, are equally used herein.

[0501] It should be appreciated that any of the methods and compositions described by the invention may be applicable for treating and/or ameliorating any of the disorders disclosed herein or any condition associated therewith. It is understood that the interchangeably used terms “associated”, “linked” and “related”, when referring to pathologies herein, mean diseases, disorders, conditions, or any pathologies which at least one of: share causalities, co-exist at a higher than coincidental frequency, or where at least one disease, disorder condition or pathology causes the second disease, disorder, condition or pathology. More specifically, as used herein, “disease”, “disorder”, “condition”, “pathology” and the like, as they relate to a subject's health, are used interchangeably and have meanings ascribed to each and all of such terms.

[0502] The present invention relates to the treatment of subjects or patients, in need thereof. By “patient” or “subject in need” it is meant any organism who may be affected by the above-mentioned conditions, and to whom the therapeutic and prophylactic methods herein described are desired, including humans, domestic and non-domestic mammals such as canine and feline subjects, bovine, simian, equine and rodents, specifically, murine subjects. More specifically, the methods of the invention are intended for mammals By “mammalian subject” is meant any mammal for which the proposed therapy is desired, including human, livestock, equine, canine, and feline subjects, most specifically humans.

[0503] Still further, the methods of the invention may be also applicable for curing, preventing, ameliorating and treating a pathologic disorder in any vertebrate or invertebrate organisms as disclosed by the invention. In yet some further embodiments, the invention may be further applicable for treating pathologic disorders in plants, specifically, any of the plants disclosed by the invention.

[0504] As described above, the PAM reduced or abolished Cas protein of the invention, any chimeras or systems thereof, and the encoding nucleic acid sequences of the invention may be administered by the methods of the invention either ex vivo, by introduction thereof into cells that are being transplanted or transferred to the treated subject, or alternatively in vivo, where the PAM reduced or abolished Cas protein of the invention or any vector or composition thereof are directly administered to the subject.

[0505] It should be therefore understood that the number of administrations of treatment to a subject may vary. Introducing the genetically modified or transiently expressing cells that comprise the genetic manipulation caused by the PAM reduced or abolished Cas protein of the invention, into the subject may be a one-time event; but in certain situations, such treatment may elicit improvement for a limited period of time and require an on-going series of repeated treatments. In other situations, multiple administrations of the genetically modified or transiently expressing cells may be required before an effect is observed. The exact protocols depend upon the disease or condition, the stage of the disease and parameters of the individual subject being treated.

[0506] As mentioned above, the invention concerns any eukaryotic organism and as such may be also applicable for members of the biological kingdom Plantae.

[0507] In more specific embodiments, the PAM-reduced or abolished Cas protein or the nucleic acid guided genome modifier/effector chimeric protein, complex or conjugate of the invention and any systems, compositions and methods thereof, may be applicable for any plant. In more specific embodiments, such plant may be a dioecious plant or monoecious plant.

[0508] More specifically, in some embodiments the organism of the biological kingdom Plantae may be a dioecious plant, specifically, a plant presenting biparental reproduction. In some specific embodiments, the plant manipulated by the methods and systems of the invention may be of the family Cannabaceae, specifically, any one of Cannabis (hemp, marijuana) and Humulus (hops). In more specific embodiments, the plant of the family Cannabaceae may be Cannabis (hemp, marijuana). In yet some further embodiments, the plant of the family Cannabaceae may be Humulus (hops).

[0509] In some embodiments, any plants are applicable in the present invention, for example, any model plants such as, Arabidopsis, Tobacco, Solanum licopersicum, Solanum tuberosum.

[0510] In yet some further embodiments, Canola, Cereals (Corn wheat, Barley), rice, sugarcane, Beet, Cotton, Banana, Cassava, sweet potato, lentils, chickpea, peas, Soy, nuts, peanuts, Lemna, Apple, may be applicable in the present invention.

[0511] A non-comprehensive list of useful annual and perennial, domesticated or wild, monocotyledonous or dicotyledonous land plant or Algae — (i.e unicellular or multicellular algae including diatoms, microalgae, ulva, nori, gracilaria), applicable in accordance with the invention may include but are not limited to crops, ornamentals, herbs (i.e., labiacea such as sage, basil and mint, or lemon grass, chives), grasses (i.e., lawn and biofuel grasses and animal feed grasses), cereals (i.e., rice, wheat, rye, oats, corn), legumes (i.e. soy, beans, lentils, chick peas, peas, peanuts), leafy vegetables (i.e. kale, bok-choi, cress, lettuce, spinach, cabbage), Amaranthacea (i.e. sugar beet, beet, quinoa, spinach), Compositea (i.e. sunflower, lettuce, aster), Malvaceae (i.e. cotton, cacao, okra, hibiscus), cucurbits (i.e., cucumber, squash, melon, watermelon), Solanaceous species (i.e tobacco, potato, tomato, petunia and pepper), Umbellifera (i.e. carrot, celery, dill, parsley, cumin), Crucifera (i.e., oilseed rape, mustard, brassicas, cauliflower, radish), Sesame, the monocot Aspargales (i.e. onion, garlic, leek, asparagus, vanilla, lilies, tulips, narcissus), Myrtacea (i.e., Eucalyptus, pomegranate, guava), Subtropical fruit trees (i.e. Avocado, Mango, Litchi, papaya), Citrus (i.e. orange, lemon, grapefruit), Rosacea (i.e. apple, cherry, plum, almond, roses), berry-plants (i.e. grapes, mulberries, blueberries, raspberry, strawberry), nut trees (i.e. macademia, hazelnut, pecan, walnut, chestnuts, brazil nut, cashew), banana and plantain, palms (i.e., oil-palm, coconut and dates), evergreen, coniferous or deciduous trees, woody species.

[0512] Still further, plants useful for food, beverage (i.e. passion fruit, citrus, Paulinia, Humulus), biofuel (i.e. Ricinus, maize, soy, oil-palm, Jatropha, Switchgrass) biopesticide (i.e. pyrethrum, neem tree), ornament (i.e. cut, gardened or potted flower species such as lilies, roses, carnations, Poinsettia, petunia, cactuses, daffodils, shrubs, climbing plants, junipers), fibers (i.e. cotton, flax, agave, cannabis), construction, paper and cardboard, pigments, latex (i.e. Hevea), alcohol (i.e. grape, rye, sugarcane, cereals, fruit), oil (i.e. soy, peanut, sesame, maize, canola, rape, olive, oil-palm, argan, nuts), sugar (i.e. maize, sugarcane, sugar-beet, maple), fruit and vegetable, tea, coffee, cacao, olives, spices (i.e. ginger, cinnamon, curry, fenugreek, cumin, pepper, cardamom), chemical extraction, phytochemicals, antioxidants (i.e. plants producing phenolics, carotenoids, anthocyanins, and tocopherols), non-sugar sweeteners (i.e. Stevia), medicinal or bioactive compound producing plants (i.e. poppy, alkaloid producing species, cannabis, willow, foxglove, Cinchona (quinine) and Artemisia (antimalarial)), lawns, research model plants (i.e. Arabidopsis, tobacco), cosmetically useful plants (i.e. argan, aloe, jojoba, lavender, chamomile, tea-tree, geranium), industrially useful plants, industrial feedstock plants, animal (incl mammal, fish and insect) feed and fodder plants, bio-amelioration plants, fertilization, breeding stock, as encompassed by the invention.

[0513] In yet some further embodiments, nonfood products made from plants include essential oils, natural dyes, pigments, waxes, resins, tannins, alkaloids, amber and cork. Products derived from plants include soaps, shampoos, perfumes, cosmetics, paint, varnish, turpentine, rubber, latex, lubricants, linoleum, plastics, inks, and gums.

[0514] In some embodiments, the methods and systems of the invention may be applicable for any plant parts, specifically, leaves, shoots, seedlings, fronds, cane, seeds, fruit, nuts, berries, flowers, trunks, branches, bark, roots, corms, rhizomes bulbs and stems, latexes and exudates. Other plants that are pests (i.e. Orobanchaceae, Cuscuta) or weeds (broad-leaf weeds such as Convolvulus, Datura and monocot grasses such as crab grass, Cyperus).

[0515] Still further, another aspect of the invention relates to an effective amount of at least one of:

[0516] (a) at least one Cas protein or any Cas protein derived domain having reduced or abolished PAM constraint or any fragment, variant, mutant, fusion/chimeric protein, complex or conjugate thereof, or at least one nucleic acid sequence encoding said Cas protein or any variant, mutant, fusion/chimeric protein or conjugate thereof. More specifically, in some optional embodiments, at least one of: the PBD and/or the PAM recognition motif, and/or the HNH-nuclease domain of the Cas protein, any fragment of the PBD, and/or of the PAM recognition motif, and/or of the HNH-nuclease domain, and at least one amino acid residue adjacent to the PBD, and/or to the PAM recognition motif, and/or to the HNH-nuclease domain, is deleted, substituted, mutated or replaced;

[0517] (b) at least one target recognition element or any nucleic acid sequence encoding said target recognition element;

[0518] (c) at least one nucleic acid cassette or any vector or vehicle comprising the nucleic acid sequence of (a), the nucleic acid sequence of (b) or the nucleic acid sequence of (a) and (b);

[0519] (d) at least one system comprising (a) and (b);

[0520] (e) at least one host cell modified by, and/or comprising at least one of: (a), (b),(c) and (d); and

[0521] (f) at least one composition comprising at least one of (a), (b), (c), (d) and (e); for use in methods of curing or treating, preventing, inhibiting, reducing, eliminating, protecting or delaying the onset of a pathologic disorder or condition in a subject in need thereof.

[0522] In yet some further aspects thereof, the invention provides an effective amount of at least one of: (a) at least one Cas protein or any Cas protein derived domain having reduced or abolished PAM constraint or any variant, mutant, fusion/chimeric protein, complex or conjugate thereof, or at least one nucleic acid sequence encoding said Cas protein or any fragment, variant, mutant, fusion/chimeric protein or conjugate thereof. More specifically, in some optional embodiments, at least one of: the PBD and/or the PAM recognition motif, and/or the HNH-nuclease domain of the Cas protein, any fragment of the PBD, and/or of the PAM recognition motif, and/or of the HNH-nuclease domain, and at least one amino acid residue adjacent to the PBD, and/or to the PAM recognition motif, and/or to the HNH-nuclease domain, is deleted, substituted, mutated or replaced;

[0523] (b) at least one target recognition element or any nucleic acid sequence encoding the target recognition element;

[0524] (c) at least one nucleic acid cassette or any vector or vehicle comprising the nucleic acid sequence of (a), the nucleic acid sequence of (b) or the nucleic acid sequence of (a) and (b);

[0525] (d) at least one system comprising (a) and (b); and

[0526] (e) at least one composition comprising at least one of (a), (b), (c), and (d); for use in method of modifying at least one target nucleic acid sequence of interest in at least one cell or in a biochemical reaction.

[0527] In some embodiments, any of the CRISPR-Cas protein as defined herein, any of the fusion/chimeric protein or conjugate thereof, specifically, any of the nucleic acid guided genome modifier/effector chimeric protein, complex or conjugate according to the invention, any of the nucleic acid molecules as defined by the invention, any of the systems defined by the invention, any of the host cells of the invention and any of the compositions disclosed by the invention, are provided herein for use in methods of curing or treating, preventing, inhibiting, reducing, eliminating, protecting or delaying the onset of a pathologic disorder or condition in a subject in need thereof, and for use in methods for modifying at least one target nucleic acid sequence of interest in at least one cell.

[0528] It should be appreciated that according to some embodiments, the invention further provides transgenic organism/s or knock out organism/s, having a predetermined genetic modification formed by the method described herein. In some embodiments, the organism is any plant or an animal disclosed by the invention.

[0529] It should be further understood that the invention further encompasses any kit comprising any of the systems, compositions and cells of the invention or any combinations thereof with any additional therapeutic agent.

[0530] A kit as used herein may comprise the compositions described herein together with any or all of the following: assay reagents, buffers, probes and/or primers, and sterile saline or another pharmaceutically acceptable emulsion and suspension base. In addition, the kits may include instructional materials containing directions (e.g., protocols) for the practice of the methods described herein

[0531] All definitions, as defined and used herein, should be understood to control over dictionary definitions, definitions in documents incorporated by reference, and/or ordinary meanings of the defined terms.

[0532] The term “about” as used herein indicates values that may deviate up to 1%, more specifically 5%, more specifically 10%, more specifically 15%, and in some cases up to 20% higher or lower than the value referred to, the deviation range including integer values, and, if applicable, non-integer values as well, constituting a continuous range. In some embodiments, the term “about” refers to ±10 %.

[0533] The indefinite articles “a” and “an,” as used herein in the specification and in the claims, unless clearly indicated to the contrary, should be understood to mean “at least one.” It must be noted that, as used in this specification and the appended claims, the singular forms “a”, “an” and “the” include plural referents unless the content clearly dictates otherwise.

[0534] The phrase “and/or,” as used herein in the specification and in the claims, should be understood to mean “either or both” of the elements so conjoined, i.e., elements that are conjunctively present in some cases and disjunctively present in other cases. Multiple elements listed with “and/or” should be construed in the same fashion, i.e., “one or more” of the elements so conjoined. Other elements may optionally be present other than the elements specifically identified by the “and/or” clause, whether related or unrelated to those elements specifically identified. Thus, as a non-limiting example, a reference to “A and/or B”, when used in conjunction with open-ended language such as “comprising” can refer, in one embodiment, to A only (optionally including elements other than B); in another embodiment, to B only (optionally including elements other than A); in yet another embodiment, to both A and B (optionally including other elements); etc.

[0535] As used herein in the specification and in the claims, “or” should be understood to have the same meaning as “and/or” as defined above. For example, when separating items in a list, “or” or “and/or” shall be interpreted as being inclusive, i.e., the inclusion of at least one, but also including more than one, of a number or list of elements, and, optionally, additional unlisted items. Only terms clearly indicated to the contrary, such as “only one of” or “exactly one of,” or, when used in the claims, “consisting of,” will refer to the inclusion of exactly one element of a number or list of elements. In general, the term “or” as used herein shall only be interpreted as indicating exclusive alternatives (i.e., “one or the other but not both”) when preceded by terms of exclusivity, such as “either,” “one of,” “only one of,” or “exactly one of” “Consisting essentially of,” when used in the claims, shall have its ordinary meaning as used in the field of patent law.

[0536] As used herein in the specification and in the claims, the phrase “at least one,” in reference to a list of one or more elements, should be understood to mean at least one element selected from any one or more of the elements in the list of elements, but not necessarily including at least one of each and every element specifically listed within the list of elements and not excluding any combinations of elements in the list of elements. This definition also allows that elements may optionally be present other than the elements specifically identified within the list of elements to which the phrase “at least one” refers, whether related or unrelated to those elements specifically identified. Thus, as a non-limiting example, “at least one of A and B” (or, equivalently, “at least one of A or B,” or, equivalently “at least one of A and/or B”) can refer, in one embodiment, to at least one, optionally including more than one, A, with no B present (and optionally including elements other than B); in another embodiment, to at least one, optionally including more than one, B, with no A present (and optionally including elements other than A); in yet another embodiment, to at least one, optionally including more than one, A, and at least one, optionally including more than one, B (and optionally including other elements); etc.

[0537] It should also be understood that, unless clearly indicated to the contrary, in any methods claimed herein that include more than one step or act, the order of the steps or acts of the method is not necessarily limited to the order in which the steps or acts of the method are recited.

[0538] Throughout this specification and the Examples and claims which follow, all transitional phrases such as “comprising,” “including,” “carrying,” “having,” “containing,” “involving,” “holding,” “composed of,” and the like are to be understood to be open-ended, i.e., to mean including but not limited to. Specifically, it should be understood to imply the inclusion of a stated integer or step or group of integers or steps but not the exclusion of any other integer or step or group of integers or steps. Only the transitional phrases “consisting of” and “consisting essentially of” shall be closed or semi-closed transitional phrases, respectively, as set forth in the United States Patent Office Manual of Patent Examining Procedures. More specifically, the terms “comprises”, “comprising”, “includes”, “including”, “having” and their conjugates mean “including but not limited to”. The term “consisting of” means “including and limited to”. The term “consisting essentially of” means that the composition, method or structure may include additional ingredients, steps and/or parts, but only if the additional ingredients, steps and/or parts do not materially alter the basic and novel characteristics of the claimed composition, method or structure.

[0539] It should be noted that various embodiments of this invention may be presented in a range format. It should be understood that the description in range format is merely for convenience and brevity and should not be construed as an inflexible limitation on the scope of the invention. Accordingly, the description of a range should be considered to have specifically disclosed all the possible sub ranges as well as individual numerical values within that range. For example, description of a range such as from 1 to 6 should be considered to have specifically disclosed sub ranges such as from 1 to 3, from 1 to 4, from 1 to 5, from 2 to 4, from 2 to 6, from 3 to 6 etc., as well as individual numbers within that range, for example, 1, 2, 3, 4, 5, and 6. This applies regardless of the breadth of the range. Whenever a numerical range is indicated herein, it is meant to include any cited numeral (fractional or integral) within the indicated range. The phrases “ranging/ranges between” a first indicate number and a second indicate number and “ranging/ranges from” a first indicate number “to” a second indicate number are used herein interchangeably and are meant to include the first and second indicated numbers and all the fractional and integral numerals there between. As used herein the term “method” refers to manners, means, techniques and procedures for accomplishing a given task including, but not limited to, those manners, means, techniques and procedures either known to, or readily developed from known manners, means, techniques and procedures by practitioners of the chemical, pharmacological, biological, biochemical and medical arts.

[0540] It is appreciated that certain features of the invention, which are, for clarity, described in the context of separate embodiments, may also be provided in combination in a single embodiment. Conversely, various features of the invention, which are, for brevity, described in the context of a single embodiment, may also be provided separately or in any suitable sub combination or as suitable in any other described embodiment of the invention. Certain features described in the context of various embodiments are not to be considered essential features of those embodiments, unless the embodiment is inoperative without those elements.

[0541] Various embodiments and aspects of the present invention as delineated herein above and as claimed in the claims section below find experimental support in the following examples.

[0542] Disclosed and described, it is to be understood that this invention is not limited to the particular examples, methods steps, and compositions disclosed herein as such methods steps and compositions may vary somewhat. It is also to be understood that the terminology used herein is used for the purpose of describing particular embodiments only and not intended to be limiting since the scope of the present invention will be limited only by the appended claims and equivalents thereof.

[0543] The following examples are representative of techniques employed by the inventors in carrying out aspects of the present invention. It should be appreciated that while these techniques are exemplary of preferred embodiments for the practice of the invention, those of skill in the art, in light of the present disclosure, will recognize that numerous modifications can be made without departing from the spirit and intended scope of the invention.

### EXAMPLES

[0544] Without further elaboration, it is believed that one skilled in the art can, using the preceding description, utilize the present invention to its fullest extent. The following preferred specific embodiments are, therefore, to be construed as merely illustrative, and not limitative of the claimed invention in any way.

[0545] Experimental Procedures

[0546] Cells

[0547] HEK-293 cells [Embryonic Kidney; Human (Homo sapiens), ATCC].

[0548] Constructs

[0549] Plasmids for the expression of the modified Cas constructs were constructed by Gibson assembly of a DNA fragment (ordered from GeneArt) into a KanR PUC57-based backbone under the CMV promotor and the BGH terminator (Construct number and description in Table 1 below; protein sequence are presented in sequence listing).

[0550] EMX1 target 1 sgRNA constructs were ordered (GeneArt) in pairs (for the dCas-FokI system (Example 1), and for the dScCas-FokI system (Example 3) one sgRNA under H1 promoter and the other under the human U6 promoter. Different sgRNA distances (15 base and 27 base “gaps”) were designed. sgRNAs expressed from plasmid SEQ ID: 294 have a 15 bp gap, sgRNAs expressed from plasmid SEQ ID: 1 have a 27 bp gap.

[0551] Another double sgRNA cassette was ordered with a spacer of 15 bp, forming plasmid number 10917, that comprises the nucleic acid sequence as denoted by SEQ ID NO. 23.

TABLE 1
Plasmids

| | | | Bacterial | Guide |
|---|---|---|---|---|
| Number | Name | Plasmid Description | stock # | description |
| 10916 | dScCas9-FokI | Plasmid ordered from | 10918 | Guide pair |
| SEQ ID | EMX1sgRNA27T1- | GeneArt. dC9F - | | with a 27 base |
| NO. 1 | NNG | deactivated ScCas9 | | gap |
| | | PAM = NNG with FokI | | |
| | | under CMV-Promoter and | | |
| | | BGH terminator. With U6 | | |
| | | and H1 promoters and | | |
| | | sgRNAs for EMX1 | | |
| | | distance(is not 15) distance | | |
| | | is 27 target 1 | | |
| 11035 | dScCas9-FokI - | Digestion of 10916 by MluI | 11035 | Guide pair |
| SEQ ID | EMX1sgRNA15T1- | and Gibson assembly with | | with a 15 base |
| NO. 294 | NNG | 1017 AgeI to replace | | gap |
| | | SCNAs region | | |
| 11235 | dScCas9- | Digestion of 10918 by MluI | 11241 | No guide RNA |
| SEQ ID | FokI-NNG | to omit sgRNA, resulting in | | |
| NO. 270 | | dScCas9-FokI -NNG | | |
| | | confirmed by seq as dCAs | | |
| | | (no HSSBs) no sgRNA | | |
| | | confirmed by seq seq - | | |
| | | 190507NN005 | | |
| 10917 | DemxT1v2 | Plasmid ordered from | 10920 | Guide pair |
| SEQ ID | EMX1sgRNA15T1- | GeneArt. U6 and H1 | | with a 15 base |
| NO. 23 | NNG | promoters and sgRNAs for | | gap |
| | | EMX1 distance 15 target 1 | | |
| 11248 | dScCas9-FokI | Deleting the HnH domain - | | Guide pair |
| SEQ ID | dHNH- | PCR on 10916 and cloning | | with a 27 base |
| NO. 9 | F-NNG EMX1 T1 | to 10918 dScCas9-FokI -F- | | gap |
| | sgRNA 27 | NNG. 3157/3207, | | |
| | | 3206/3158 to 10918 | | |
| | | EcoRI/BamHI/HindIII. | | |
| | | N50p64-78 | | |
| 11254 | dScCas9-FokI | 11248 digested by MluI To | | No guide RNA |
| SEQ ID | dHNH- | omit the sgRNA cassette | | |
| NO. 13 | F-NNG | colony - 1 N50p79-80 | | |

[0552] Cloning

[0553] Cloning of dScCas9—FokI (Example 1):

[0554] dScCas9-FokI plasmid construct 10916 (as denoted by SEQ ID NO. 1) containing CMV promoter, dScCas9-FokI, BGH-Terminator and a double sgRNA cassette containing the 27 spacer EMX1 Targetl sgRNAs was ordered from Geneart. This cassette encodes the dScCas9-FokI Protein that comprise the amino acid sequence as denoted by SEQ ID NO. 2. The sgRNA cassette for this cassette is EMX1sgRNA27T1-NNG (the nucleic acid sequence is denoted by SEQ ID NO. 3). Another double sgRNA cassette was ordered with a spacer of 15 bp, forming plasmid number 10917 EMX1sgRNA15T1-NNG (the nucleic acid sequence is denoted by SEQ ID NO. 4).

[0555] Cloning of dScCas9-FokI size-reduction (Example 3) construct 11248 (seq 9)

[0556] The following sequence containing CMV promoter, dHNH-dScCas9-Fok, BGH-Terminator and a double sgRNA cassette containing the 27 spacer EMX1 Targetl sgRNAs was constructed as follow: PCR on 10916 with primers 3157/3207,3206/3158 (Table 2) and Gibson assembly cloning to 10918 (Ecoli stock of plasmid 10916) dC9Xten-F-NNG digested by EcoRI/BamHI/HindIII.

TABLE 2
Primers list of dHNH

| Primer | | SEQ |
|---|---|---|
| name | Primer sequence | ID NO: |
| 3157 | ATTAGTTCATAGCCCATATATGGAGTTC | 5 |
| 3158 | TACGCGTAGTTGTGGGTTTGTC | 6 |
| 3206 | TCCAGAGAGAGAAAGAAGCGcGGCGGACT | 7 |
| | GTCTGAAGCTGAT | |
| 3207 | ATCAGCTTCAGACAGTCCGCCgCGCTTCTT | 8 |
| | TCTCTCTCTGGA | |

[0557] Reverse Transfection

[0558] Reverse transfection to HEK-293 cells was done using TransIT® LT1 transfection reagent (Mirus Bio) diluted in serum-free medium Opti-MEM® I (Gibco). Transfection reagent:DNA ratio of 5 pl per 1 μg DNA was used. For reverse transfection in a well in 96 wells plate: 100 ng plasmid DNA was used in 3 ul total volume (33.3 ng/u1). Transfection reagent was first diluted (1:19) in Opti-MEM® I. Then, 3 ul DNA (33.3 ng/u1) was added to the diluted transfect reagent, mixed gently and incubated 15-30 min in room temperature. Then, HEK-293 cells (3.6×10⁴) were gently added on the top of the TransIT®-DNA complexes and mixed as is customary. Cells were incubated 72 h in 37° C. in a CO2 incubator (HERACELL 150i, Thermo Scientific). If co-transfection was done, plasmids were equally mixed in advance to final DNA concentration of 100 ng/3 ul. (for example: if two plasmids were used, 50 ng from each plasmid was mixed in 3 ul final volume 33.3 ng/ul DNA, if three plasmids were used, 33.3 ng from each was mixed in 3 ul final volume 33.3 ng/ul DNA).

[0559] Genomic DNA Preparation

[0560] Genomic DNA (gDNA) from HEK-293 cells was extracted 72 hours post transfection, using the Quick-DNA™ 96 Kit (Zymo Research). Medium was removed using vacuum and glass Pasteur pipette. Then, 200 μl Genomic Lysis Buffer were added and using mechanic pipetation up and down, cells were directly lysed in the 96 plate well. The concentration of gDNA was determined using NanoDrop 2000 (Thermo Scientific).

[0561] Droplet Digital PCR Design and Execution.

[0562] QX200™ Droplet Digital™ PCR system (BIORAD) was used for the mutations analysis in the target site on the gDNA.

[0563] Assay designed, TGEE3 or TGEE4 for mutation detection in EMX1 gene -Target1:

[0564] Detailed reaction particulars and primers can be found in Table 3 (Tables 3a, 3b, 3c and 3d). As TGEE3 and TGEE4 are assays to analyze mutation in adjacent sites, same primers were used for the amplification of the target site were in both assays. In addition, the same reference probe was used for both assays. The drop-off probes were different and specific for each site.

[0565] Primers 3042-Forward and 3049-Reverse (as denoted by SEQ ID NO. 18 and SEQ ID NO. 19, respectively), were designed to amplify one specific 317 bp fragment in Tm=55° C. The primers that were designed as reference and drop off probes were first tested in a simple PCR reaction to amplify a specific fragment when using with the 3049-Reverse primer in Tm=55° C. Then, the reference probe was ordered from IDT with FAM™ modification in the 5′ end and with Iowa Black® Quencher in the 3′ end. The drop off probe was ordered from IDT with HEX™ modification in the 5′ end and with Iowa Black® Quencher in the 3′ end with 2 locked nucleic acid (LNA) bases inside the target site. Tm of reference and drop off probes were designed to be higher in 3-10° C. than 55° C.

TABLE 3a
Assay execution:

| | |
|---|---|
| EMX1-Target1-TGEE3 | for 1 reaction |
| orTGEE4assay | |
| 2XddPCR Supermix for probes | 11 μl |
| 20X NHEJ TGEE-3 or TGEE4 | 1 μl |
| EMX1-T1 | |
| HindIII diluted 2-5 U/μl | 1 μl |
| 150 ng gDNA | 9 μl |

TABLE 3b

| | |
|---|---|
| 20X NHEJ TGEE-3 or TGEE4 | μl for 100 reactions |
| EMX1-T1 | |
| 18 uM primer 3042-EMX1-T1- | 18 μl |
| ddPCR-F1 | |
| 18 uM primer 3049-EMX1-T1- | 18 μl |
| ddPCR-R2 | |
| 100 uM 3088-EMX1-T1-TGEE3- | 5 μl |
| reference probe | |
| 100 uM 3089-EMX1-T1-TGEE3- | 5 μl |
| drop off probe (HEX/2XLNAs) or | |
| 13175-EMX1-T1-TGEE4-drop | |
| off probe (HEX/2XLNAs) | |
| DDW | 54 μl |

TABLE 3c

| | |
|---|---|
| HindIII diluted 2-5 U/μl | μl for 100 |
| | reactions |
| 10X buffer CutSmart NEB | 10 μl |
| HindIII NEB | 25 μl |
| DDW | 65 μl |

TABLE 3d

| Primers and probes | for 1 reaction |
|---|---|
| 3042-EMX1-T1-ddPCR-F1 | gaaaccatgcccattc as denoted by SEQ ID NO: 18 |
| 3049-EMX1-T1-ddPCR-R2 | agagaagggtggttttc as denoted by SEQ ID NO: 19 |
| 3088-EMX1-T1-TGEE3- | /56-FAM/CT CTG TAT G/ZEN/G AAA AGA GCA |
| reference probe | T/3IABkFQ/ as denoted by SEQ ID NO: 20 |
| 3089-EMX1-T1-TGEE3-drop off | /5HEX/tcgtaga+g+tcccatgtc/3IABkFQ as denoted by |
| probe | SEQ ID NO: 21 |
| 3175-EMX1-T1-TGEE4-drop off | /5HEX/ATGTCTGC+C+GGCTTCC/3IABkFQ |
| probe | as denoted by SEQ ID NO: 22 |

[0566] It should be noted that the probes used herein, specifically, the probes of SEQ ID Nos. 20-22, that comprise an “+n nucleotide”, for example, +C or +G (n can be a, c, g, or t), refers to a “N”, where there is a methylene bridge bond linking the 2′ oxygen to the 4′ carbon of the RNA pentose ring. This bond causes higher structural rigidity and increased melting temperature of the oligonucleotide.

[0567] Data Analysis

[0568] QX200™ Droplet Reader and QuantaSoft™ software (BIORAD) were used for Data analyzing. For each assay and each experiment, a threshold was determined in relation to all experiment treatments, controls and no DNA control sample.

[0569] Thresholds were analyzed separately for each experiment and for each assay, as presented by Table 4:

TABLE 4
ddPCR Analysis thresholds

| Experiment | Assay TGEE3 | Assay TGEE4 |
|---|---|---|
| 1 (#13) | | FAM1840/HEX2410 |
| 2 (#16) | FAM 1500/HEX1430 | FAM1500/HEX1770 |
| 3 (#32) | | FAM 2900/HEX 1900 or |
| | | FAM2020/HEX1570 |

[0570] Poisson correction was done according to manufacturer's instructions (Droplet Digital PCR Applications Guide, BioRad, p7-8). Briefly, a Poisson correction factor is inferred by modeling a Poisson distribution from the fraction of empty cells. Explicitly, the Poisson correction factor is the infinite sum of the probability of a cell containing 1 DNA molecule only, plus two times the probability of two DNA molecules, plus three times the probability of three DNA molecules, and so on. This correction factor is multiplied with the observed number of hits to find the true number of DNA molecules.

[0571] Delivery—Protoplasts

[0572] Bioassay setup: Arabidopsis protoplast preparation is based on Wu et. al. (Wu et al, Plant methods 16, 2009):

[0573] Plant material: Arabidopsis grown under 16 hr day optimal light (150 μE·s⁻¹) @ 22° C. Leaves: 3-5 week old plants (W ˜2cm L ˜5cm).

[0574] Work Solutions: Enzyme solution. 1%Cellulase, 0.25% Macerozyme, 0.4M Mannitol, 10 mM CaCl₂, 20 mM KCl, 0.1% BSA, 20 mM MES pH5.7. Heat 50-55° C. 10 minutes to inactivate proteases and then filter. Use fresh. 10 ml/7-10 peeled leaves (1-5 gr)/dish.

[0575] Modified W5 solution. 154 mM NaCl, 125 mM CaCl₂, 5 mM KCl, 5 mM Glucose, 2 mM MES pH5.7. Wash twice with 25 ml/plate, +twice 3 ml for transfection wash+/ml resuspension

[0576] Modified MMg solution. (Resuspension solution) 0.4M Mannitol, 15 mM MgCl₂, 4 mM MES pH5.7.

[0577] Modified TEAMP transfection buffer (PEG solution). 40% PEG MW 4000, 0.1M CaCl₂, 0.2M Mannitol (freshly prepared!) volume=1:1 of 200 μl protoplasts in MMg +volume of DNA BSA. 1% BSA

[0578] Arabidopsis Protoplasts

[0579] 1. Preheat water bath to 50-55° C., cool swing-out centrifuge, chill W5 and MMg, and cut tips.

[0580] 2. Prepare fresh BSA coated plates (tentative: 1.25ml 1%BSA/well in water, incubate on bench till ready)

[0581] 3. Make fresh enzyme solution 10 ml/treatment.

[0582] 4. Pick 7-10 leaves, must not be wet. 10 leaves should yield ˜4-5 transformations.

[0583] 5. Tape upper epidermis with Time-tape, lower with Magic tape. Easier to peel if petiole is stuck to time-tape only.

[0584] 6. 0.22 μm-filter 10 ml fresh enzyme solution into each petri dish

[0585] 7. Peel and discard Magic tape. Transfer Time-tape side to petri dish

[0586] 8. Gently shake on platform shaker 40 rpm 20-60 min in light until protoplast release (check empirically)

[0587] 9. Centrifuge in 50 ml tubes 100×g 3 min in swing-out rotor

[0588] 10. Wash twice with 25 ml cold W5

[0589] 11. Ice 30 min, count during this time in hemocytometer using light microscope

[0590] 12. Centrifuge and resuspend in MMg to 2-5×10⁵ cells/ml (about 1 ml).

[0591] Transfection:

[0592] 1. Make fresh PEG sol for transfection in 2 ml tube

[0593] 2. Pour off BSA from 6-well plates and dry

[0594] 3. Mix ˜5×10⁴ protoplasts (2×10⁴−1×10⁵) in 0.2 ml MMg with a mixture of Donor plasmid DNA (where relevant), Protein Moiety expressing plasmid DNA and SCNAs ssDNA to a total of 30-40 μg at RT° in 15 ml round-bottom (snap-cap) tubes. Alternatively, Donor DNA and Protein-moiety expressing DNA are constructed and delivered on a single plasmid.

[0595] 4. Add equal volume (0.2 ml protoplasts +midiprep vol.) of fresh PEG sol

[0596] 5. Incubate RT° 5 min

[0597] 6. Wash by slowly adding 3 ml W5, lml at a time, and mixing

[0598] 7. Centrifuge 100×g in swing-out 1 min

[0599] 8. Repeat wash and pellet

[0600] 9. Resuspend in lml W5

[0601] 10. Pour into BSA-coated plates

[0602] 11. Grow protoplasts under 16 hr day optimal light (150 μE·m⁻²·s⁻¹)@ 22° C., replacing media as needed.

[0603] Arabidopsis Floral Dip Protocol

[0604] 5% sucrose solution containing 0.01-0.05% (vol/vol) Silwet L-77 and resuspended Agrobacterium cells.

[0605] In vitro activity assay (for Example 6)

[0606] Materials used:

[0607] Protein expression:

[0608] For protein expression, TNT® SP6 High-Yield Wheat Germ Protein E L3261 (Promega) was used as described in Table 5.

TABLE 5
In vitro protein expression
Reaction volume - 50 μl

| | | |
|---|---|---|
| TnT SP6 High-Yield Wheat | 30 | μl |
| Wheat Germ Master Mix | | |
| DNA (purified PCR product) | 8 | μl |
| DDW | 12 | μl |
| Total | 50 | μl |

[0609] TNT Template DNA should be about:

[0610] (3.7 Kb-2-3 μg DNA required) therefore 4 μg of PCR product for dScCAS9FokI (or equivalent other RNA guided nucleases)

[0611] sgRNA:

[0612] Alt-R® CRISPR-Cas9 sgRNA, 2 nmol (IDT), or equivalent

[0613] DNA substrate for the reaction:

[0614] Digest DNA in buffer 3.1 with BsaI (NEB). 100 ng/μl final concentration (10 μg/100 μl).

[0615] Take 2 μl (3 Kb plasmid) for the final reaction.

[0616] The in-vitro activity assay:

[0617] 1. Make a mix by Table 6.

TABLE 6
In vitro nuclease assay
Experiment reaction (based on NEB cat. M0386S):

| | | Adjusted to | | | |
|---|---|---|---|---|---|
| | NEB | SP6 Promega TnT | | | |
| | protocol for | Volume | | | |
| | Cas9 | | 1X | | X |
| Nuclease-free water | 20 μl | | 15 | μl | |
| NEBuffer 3.1 | 3 μl | | 3 | μl | |
| 300 nM sgRNA | 3 μl (30 nM | | 3 | μl | |
| | final) | | | | |
| 1 μM Cas9 Nuclease, | 1 μl (~30 | TnT- | 6 | μl | |
| S. pyogenes (M0386S) | nM final) | Expressed | | | |
| NEB as a control | | RNA- | | | |
| | | guided | | | |
| | | nuclease | | | |
| Reaction volume | 27 μl | | 27 | μl | |
| Pre-incubate for 10 minutes at 25° C. | | | | | |
| 30 nM substrate DNA | 3 μl (3 nM | | 1-2 μl | | |
| | final) | | plasmid | | |
| | | | DNA | | |
| Total reaction volume | 30 μl | | 30 | μl | |

[0618] 2. Mix thoroughly and pulse-spin in a microfuge.

[0619] 3. Incubate at 37° C. for 15 minutes.

[0620] 4. Add 1 μl of Proteinase K to each sample, Mix thoroughly and pulse-spin in a microfuge.

[0621] 5. Incubate at room temperature for 10 minutes.

[0622] 6. Proceed with fragment analysis.

[0623] Further considerations:

[0624] Calculation of target DNA amounts:

[0625] Due to detection limits of EtBr stained electrophoresis gels, use the following amounts of target DNA for the assay: for a sensitive assay, use an 80 bp target. Per assay use about 5 ng of biotinylated end-labeled DNA (biotin to be added via a biotinylated primer (IDT), detection via blotting and reacting the membrane with an Avidin-AP (or Avidin-peroxidase) conjugate and detection via colorimetric (or chemiluminescent assay)).

[0626] Alternatively, for simpler EtBr detection use about 200 ng unmodified DNA for a 3 kb target plasmid. This assay should be able to detect about 10% cleavage or more.

[0627] Amount of enzyme to be used

[0628] Optimally, 1 μM from the TnT protein expression reaction (bpi or less depending on TnT expression level). Practically, determined empirically in a dilution series.

[0629] Detection of digested target plasmid:

[0630] 1% Agarose gel if DNA is 3600 bp-Et-Br detection

[0631] To ease gel analysis DNA may be digested with BsaI resulting in a restriction pattern shown in Table 7.

TABLE 7
In-vitro nuclease assay analysis - expected digestion results

| | | *Orientation | *Orientation |
|---|---|---|---|
| | | 1 | 2 |
| | | Enzyme + | Enzyme + |
| | BsaI | BsaI | BsaI |
| bp | 3235 | 1797 | 1700 |
| bp | | 1453 | 1528 |

*Orientation is determined by the insertion direction of the target PCR insert

[0632] Methods for Off-Target Detection Generated by the Nucleases of the Invention

[0633] Off-target mutations may cause genomic instability and disrupt the functionality of otherwise normal genes. Therefore, it is important to be able to detect the presence of off-target cleavage. Methods for off-target detection fall into two categories, biased and un-biased. Biased methods designed to detect mutations at predicted potential off-target sites whereas unbiased methods will ideally locate this kind of mutations anywhere in the genome.

[0634] All biased methods are PCR based assays and share the same initial steps. First, prediction of off-target sites will be made using different In Silico CRISPR\Cas9 design tools or other relevant bioinformatics methods. Next, primers are designed for those specific sites and amplified by PCR in order to validate the cleavage. From this step forward, other than the obvious sequencing of the PCR products, there are several other methods to detect those anticipate off-target mutations, such as High-resolution melting analysis (HRMA), Mismatch cleavage with T7 or Surveyor endonuclease and mobility assay by PAGE

[0635] All biased methods are cheap, simple and fast but suffer from an inability to detect off-target mutations that occur at frequencies <1%, and suffer from the fact that there is a good portion of the off-target sites that cannot be predicted by the design tools available today. Furthermore these methods are not practical for large scale screening. However, when a specific oncogene or important regulatory element has been even weakly predicted to be under risk, such targeted PCR based assays should be employed.

[0636] Among the many unbiased methods existing, listed here are few of the more efficient and more relevant to the examples of the invention:

[0637] 1. LAM-HTGTS—Linear Amplification-Mediated High-Throughput Genome-Wide Translocation Sequencing

[0638] LAM PCR can detect unknown DNA sequence that is in proximity to a known one. LAM-HTGTS is based on the translocation between known DNA added to the cells (refer to as ‘bait’) and the unknown fragments of DNA where the off-target DSB have occur (refer to as ‘prey’). LAM-PCR oriented toward the ‘bait’ known DNA will also amplify the ‘prey’ sequence thus allowing us to locate and identify off target cleavage in the genome.

[0639] 2. BLESS—Direct In Situ Breaks Labeling, Enrichment on Streptavidin, and Next-Generation Sequencing

[0640] As the name suggest, in this method one labels directly the DSB using Biotinylated pinheads' linkers, enriches them on streptavidin and eventually analyzes the fragments using NGS and PCR with linker-specific primers.

[0641] 3. GUIDE-Seq-Genome-Wide Unbiased Identification of DSBs Enabled by Sequencing

[0642] In this method the identification of the DSBs occurs via blunt double-stranded oligodeoxynucleotide (dsODN) that integrate with blunt DSBs in the genome (caused by RNA guided nuclease) through end joining processes such as NHEJ. The dsODN integration sites then amplified using NGS in order to locate the off-target DSBs.

[0643] 4. Digenome-Seq—In Vitro Nuclease-Digested Genomes (Digenomes).

[0644] The genome is digested in vitro, using the guided nuclease of the invention, into smaller fragments with identical 5′ ends (sequence reads). After applying whole genome sequencing (WGS) on those fragments they will vertically align at cleavage sites, while uncut sequences will be aligned in a staggered pattern. Hence, off-target DSBs can be identified.

[0645] 5. Whole Genome Sequencing

[0646] High throughput sequencing of the entire genome and comparison to a reference sequence. The entire genome is screened for off-target mutations therefore it is very accurate but also very expensive. This method has serious drawbacks in discerning SNPs and sequencing errors from bona fide off-target mutations and in the limited number of genomes that can be sequenced.

### Example 1

### PAM-Reduced Cas-Based Nucleoprotein: dScCas9-FokI

[0647] Here, an example of a reduced-PAM nuclease-dead ScCas9-FokI nuclease fusion (dScCas9-FokI) is provided, thereby establishing the feasibility of creating effective and highly specific gene editing tools. FokI-Cas fusions have been shown for SpCas9 [8] but not for ScCas9. This alteration is highly beneficial due to a significantly larger choice of target sites caused by the removal of the requirement for NGG sequences flanking the target site. As illustrated by Table 8 below, very few potential target sites can be found bioinformatically in the two example genes with dSpCas9-FokI, while between 5.7- and 8.6-fold more targets can be targeted with dScCas9-FokI.

TABLE 8

| | | Sites in Programmed |
|---|---|---|
| Cas9 | Sites in EMX1 | Cell Death 1 (PDCD1) |
| PAM | gene (49.9 kb) | gene (9 kb) |
| SpCas9 | 4438 | 1057 |
| 5′-NGG-3′ | | |
| ScCas9 | 13596 | 2729 |
| 5′-NNG-3′ | | |
| dCas9-Fok | Sites in EMX1 | Sites in PDCD1 |
| PAM | gene (49.9 kb) | gene (9 kb) |
| SpCas9 | Only 416 | Only 160 |
| 5′-NGG-3′ | | |
| ScCas9 | 3561 | 904 |
| 5′-NNG-3′ | | |

[0648] dScCas9 (dead Streptococcus canis Cas9) has previously been inactivated by introduction of two mutations in both its HNH and RuvC nuclease domains, D1OA and H849A [9].

[0649] The PAM recognition domain of ScCas9 has been identified through its homology with SpCas9 by Chatterjee et al. PAM binding specificity is mediated by an “RXR” motif (Arginine, any amino acid, Arginine), in a similar manner to spCas9 [1]: both these proteins have a pair of Arginines (Arg) that are predicted to interact with the PAM DNA via hydrogen bonds. The native PAM requirement of ScCas9 is NNG while that of SpCas9 is NGG.

[0650] It was tested whether dScCas9-FokI can be used as a reduced-PAM obligatory-dimer genome editing system. Two SCNA (sgRNA) gaps were tested of 15 or 27 nucleotide bases. The expected best gap was 26 bases and thus 27 was not predicted to be optimal. Specifically, ddPCR analysis of the EMX1 gene targeting was tested in human cells. Different protein-SCNA (sgRNA) combinations were transfected into HEK293 cells and harvested at 72 hours post transfection. ddPCR analysis was made using BioRad software counting only single-template droplets which were HEX-negative FAM positive. This was followed by Poisson correction for inclusion of the expected number of 2,3,4 etc template containing droplets (see “tail” in FIG. 1C and 1D) as calculated from the empty/full droplet ratio multiplied by the percentage of blue droplets with a 95% confidence level. It was found that this construct is slightly less efficient than wild-type SpCas9 (see FIGS. 1A and 1B). Thus, this construct is highly useful and is a significant improvement upon both ScCas9 which is theoretically about 1 million times less precise, and upon dSpCas9-Fok which is impeded by a double NGG requirement.

### Example 2

### PAM-Abolished Cas-Based Nucleoproteins

[0651] To further improve the gene editing tools provided by the invention, the inventors next designed PAM-abolished Cas-based nucleoprotein. As illustrated in FIG. 2, dCas-FokI fusion protein comprising a Nuclear Localization Sequence (NLS), FokI nuclease monomer (FokI), nuclease-deficient Cas nucleoprotein (dCas), and a non-sequence-specific DNA-binding domain (NSDB), bound to a single guide RNA (sgRNA), was designed. Two monomers of this fusion protein bind DNA target sites separated by a double-stranded gap region (dsDNA), positioning the Fold domains for dimerization and cleavage, as schematically represented in FIG. 2.

[0652] More specifically, to reduce or abolish PAM recognition of the Cas nuclease, the inventors designed Cas variants where the PAM Binding Domain (PAM BD), including a loop containing amino acid residues Thr1330 to Arg1342 (corresponding to SpCas9 Lys1325-Arg1335) which include PAM interacting Arginine residues, is removed. While Chatterjee et al deleted Lys1337+Gln1338 (KQ) adjacent to these Arginine residues to revert the sequence to a sequence similar to SpCas9 (this deletion rendered the PAM more specific, from NNG to NGG), they did not delete the entire PAM recognition motif or the essential Arginine residues therefore retaining the requirement for at least one Guanine in the PAM.

[0653] Additional or alternative constructs encoding Cas variants with a deletion combining this loop, with a second loop (“Sc loop”) structurally adjacent (topologically but not linearly adjacent in the amino-acid sequence) to the PAM binding region and on the opposite side of the DNA helix, were also prepared. This deletion includes residues Ile 367 to Ala 376 (also performed by Chatterjee et al.). Deletion of this region further confines PAM requirement in ScCas9 from NNG to NAG while combining this mutation with KQ and Sc loop deletion further confines the specificity of ScCas9 to NGG.

[0654] Different variants of the Sc loop were designed and constructed in order to alter PAM specificity (ordered as gene synthesis constructs from various suppliers). Variants included deletions of the Sc loop, Sc loop with one or more point mutations including mutations of Arg residues 370 and 372 of ScCas9 (the ScCas9 amino acid sequence is as denoted by SEQ ID NO: 258), and Sc loop with sequences derived from homologous Cas9 variants. More specifically, the designed variants include dScCas9-FokI-LoopDel (complete deletion of the Sc Loop), as denoted by SEQ ID NO. 345; dScCas9-FokI-LoopQQ (Sc Loop with the two Arg residues mutated to Gln residues), as denoted by SEQ ID NO. 346; dScCas9-FokI-LoopAA (Sc Loop with the two Arg residues mutated to Ala residues), as denoted by SEQ ID NO. 347; dScCasFok, ScLoopASp, SV40+nucleoplasminNLS Cas9, as denoted by SEQ ID NO. 348 (Sc loop with the loop replaced by the corresponding region from SpCas9); the dScCasFok, ancestral RuvC+Rec1/2, ScLoopA, SV40+nucleoplasminNLS as denoted by SEQ ID NO: 394; the dScCasFok, ancestral RuvC+Rec1/2, ScLoopQQ, SV40+nucleoplasminNLS as denoted by SEQ ID NO: 395; the dScCasFok, ancestral RuvC+Rec1/2, ScLoopAA, SV40+nucleoplasminNLS as denoted by SEQ ID NO: 396. These modifications may also be combined with dScCas9-FokI mutations described in other examples.

[0655] Moreover, Sc loop deletions and replacements may be done in combination with mutations that may enhance stability/expression/activity, which may include ancestral mutations (see Example 16). Sc Loop deletion/mutation constructs were designed and synthesized, editing efficiency was tested, and the results are shown in Table 9. More specifically, SCNAs targeting the human MPO gene exon 1 were encoded by plasmid GeneMsgRNA15E1. MPO gene NHEJ erroneous repair was tested in Hek293 cells, harvested 72 hours after transfection with plasmids encoding the protein and the SCNAs. It was observed in one experiment (see for example ddPCR#76, Table 9), that while Sc Loop deletions and mutations had undetectable activity, addition of ancestral mutations in the REC domain improved the activity to roughly half of that of normal dScCasFok. In another experiment, all variants had detectable activity (see ddPCR#81, Table 9). Moreover, replacement of the ScLoop with the corresponding region from SpCas9 also resulted in a functional dScCasFok variant. This shows that it is possible to remove the Sc loop and retain high activity.

TABLE 9
Gene editing efficiencies of Sc loop replacement constructs

| | Construct | editing % | editing % |
|---|---|---|---|
| Description | (SEQ ID NO) | (ddPCR#76) | (ddPCR#81) |
| SpCas9, SV40 + nucleoplasmin NLS | 7665 (257) | 49.73% | 42.99% |
| dScCasFok, SV40 NLS | 11241 (2) | 17.77% | 21.24% |
| dScCasFok, ScLoopΔ, SV40 + nucleoplasminNLS | 14478 (345) | 0.00% | 7.01% |
| dScCasFok, ScLoopQQ, SV40 + nucleoplasminNLS | 14479 (346) | 0.01% | 8.86% |
| dScCasFok, ScLoopAA, SV40 + nucleoplasminNLS | 14480 (347) | 0.00% | 6.10% |
| dScCasFok, ScLoopΔSp , SV40 + nucleoplasminNLS | 14481 (348) | 8.43% | 7.59% |
| dScCasFok, ancestral RuvC + Rec1/2, ScLoopΔ, | 14483 (394) | 10.50% | 8.08% |
| SV40 + nucleoplasminNLS | | | |
| dScCasFok, ancestral RuvC + Rec1/2, ScLoopQQ, | 14484 (395) | 6.11% | 5.34% |
| SV40 + nucleoplasminNLS | | | |
| dScCasFok, ancestral RuvC + Rec1/2, ScLoopAA, | 14485 (396) | 6.41% | 6.22% |
| SV40 + nucleoplasminNLS | | | |

Editing efficiency was quantified by ddPCR (ddPCR#76 and #81 results are shown). NLS = Nuclear localization sequence.

[0656] In order to enable non-PAM-specific target DNA binding by the nucleoprotein complex, the PAM binding domain of Cas-based nucleoproteins is replaced by a Non-Sequence Specific DNA Binding Domain (NSDB).

[0657] More specifically, examples for constructs provided by the invention include dScCas9-FokI with PAM BD replaced with one or more NSDBs that include ZFs, TALEs, HTHs, SH3s, HMGs, or StkCs.

[0658] The PAM restrictions or constraints of these variants may be removed or reduced thereby widening the possibility to use these fusion proteins for genome editing in larger eukaryotic genomes without restriction of target site use.

[0659] The following PAM-abolished chimeras were constructed (ordered as gene synthesis constructs from various suppliers): dScCas9-FokI-ZF1, as denoted by SEQ ID NO. 24, dScCas9-FokI-ZF2, as denoted by SEQ ID NO. 25, dScCas9-FokI-ZF3, as denoted by SEQ ID NO. 26, dScCas9-FokI-ZF4, as denoted by SEQ ID NO. 27, dScCas9-FokI-LAC, as denoted by SEQ ID NO. 28, dScCas9-FokI-LAC2, as denoted by SEQ ID NO. 29, dScCas9-FokI-LAC3, as denoted by SEQ ID NO. 30, dScCas9-FokI-LAC4, as denoted by SEQ ID NO. 31, dScCas9-FokI-HIVIN, as denoted by SEQ ID NO. 32, dScCas9-FokI-HIVIN2, as denoted by SEQ ID NO. 33, dScCas9-FokI-HIVIN3, as denoted by SEQ ID NO. 34, dScCas9-FokI-HIVIN4, as denoted by SEQ ID NO. 35, dScCas9-FokI-SSO7D, as denoted by SEQ ID NO. 36, dScCas9-FokI-SSO7D2, as denoted by SEQ ID NO. 37, dScCas9-FokI-SSO7D3, as denoted by SEQ ID NO. 38, dScCas9-FokI-SSO7D4, as denoted by SEQ ID NO. 39, dScCas9-FokI-STO7, as denoted by SEQ ID NO. 40, dScCas9-FokI-STO72, as denoted by SEQ ID NO. 41, dScCas9-FokI-ST073, as denoted by SEQ ID NO. 42, dScCas9-FokI-ST074, as denoted by SEQ ID NO. 43, dScCas9-FokI-StkC, as denoted by SEQ ID NO. 44, dScCas9-FokI-StkC2, as denoted by SEQ ID NO. 266 and dScCas9-FokI-HMGB4 as denoted by SEQ ID NO.267.

[0660] PAM-abolished chimeras may also be combined with dScCas9-FokI mutations described in other examples. One important combination may be combination with HNH deletions (HNHA) described in EXAMPLE 3, which may allow additional space in the protein due to removal of the large HNH domain.

[0661] To evaluate ability of dCasFok variants to function with PAM BD replacements, constructs were tested in HEK293 cells for NHEJ erroneous repair using digital droplet PCR, using guide RNAs encoded by plasmid GeneMsgRNA15E1 (SEQ ID NO. 325) which targets human myeloperoxidase (MPO) gene exon 1, with ddPCR probe PM0Ex1-TGEE6 (SEQ ID NO. 327) and primers PM0Ex1 F2 FWD (SEQ ID NO. 328) and PMOEx2 R1 REV (SEQ ID NO. 329). The gene editing efficiencies of these contracts are shown in Table 10. SCNAs targeting the human MPO gene exon 1 were encoded by plasmid GeneMsgRNA15E1. MPO gene NHEJ erroneous repair was tested in Hek293 cells, harvested 72 hours after transfection with plasmids encoding the protein and the SCNAs. Activity of constructs was tested against a variant of dScCasFok with two nuclear localization sequences (SV40 (SEQ ID NO. 400) and nucleoplasmin (SEQ ID NO. 401)) at the N and C-termini, respectively.

TABLE 10A
Gene editing efficiencies of PAM BD replacement
constructs compared to dscCas9-Fok.

| | Construct | |
|---|---|---|
| | (SEQ ID #) | editing % |
| dScCasFok, 2NLS variant | 12863 | 19.59 |
| | (330) | |
| dScCasFok, 2NLS variant | 13185 | 13.69 |
| | (330) | |
| dScCasFok, HNHΔ, 2NLS variant | 13190 | 1.62 |
| | (331) | |
| dScCasFok, HNHΔ, PAMBD whole Δ, 2NLS variant | 13191 | 0.00 |
| | (332) | |
| dScCasFok, HNHΔ, PAMBD loop Δ, 2NLS variant | 13192 | 0.03 |
| | (333) | |
| dScCasFok, Zinc finger PAMBD loop replacement longer | 12869 | 0.00 |
| linkers, 2NLS variant | (334) | |
| dScCasFok, HNHΔ, Zinc finger PAMBD loop replacement, | 13194 | 0.07 |
| 2NLS variant | (314) | |
| dScCasFok, HNHΔ, Zinc finger PAMBD loop replacement | 13196 | 0.29 |
| longer linkers, 2NLS variant | (315) | |
| dScCasFok, Lac repressor DBD PAMBD whole replacement, | 12870 | 0.00 |
| 2NLS variant | (335) | |
| dScCasFok, HNHΔ, Lac Repressor DBD PAMBD whole | 13197 | 0.11 |
| replacement, 2NLS variant | (316) | |
| dScCasFok, SSO7D PAMBD whole replacement, 2NLS variant | 12878 | 0.00 |
| | (336) | |
| dScCasFok, SSO7D PAMBD whole replacement longer | 12880 | 0.00 |
| linkers, 2NLS variant | (337) | |
| dScCasFok, HNHΔ, SSO7D PAMBD whole replacement, | 13205 | 0.19 |
| 2NLS variant | (317) | |
| dScCasFok, HNHΔ, SSO7D PAMBD whole replacement | 13207 | 0.00 |
| longer linkers, 2NLS variant | (338) | |
| dScCasFok, STO7D PAMBD loop replacement longer linker, | 12885 | 0.00 |
| 2NLS variant | (339) | |
| dCasFok, HNHΔ, STO7D PAMBD loop replacement longer | 13212 | 0.04 |
| linker, 2NLS variant | (318) | |
| dCasFok, HNHΔ, HIV integrase DBD PAMBD replacement | 13203 | 0.00 |
| whole replacement longer linker, 2NLS variant | (340) | |
| dCasFok, HNHΔ, HIV integrase DBD PAMBD replacement | 13204 | 0.00 |
| loop replacement longer linker, 2NLS variant | (341) | |

Editing efficiency was quantified by ddPCR (ddPCR#64 results are shown). NLS = Nuclear localization sequence.

[0662] Nuclease activity on this endogenous gene in these human cells was successfully detected with five different constructs: (1) dScCas9-FokI, HNHA, Zinc finger PAMBD loop replacement, 2NLS (SEQ ID NO. 314); (2) dScCas9-FokI, HNHA, Zinc finger PAMBD loop replacement longer linkers, 2NLS (SEQ ID NO. 315); (3) dScCas9-FokI, HNHA, Lac repressor DBD PAMBD replacement whole replacement, 2NLS (SEQ ID NO. 316); (4) dScCas9-FokI, HNHA, SSO7D PAMBD replacement whole replacement, 2NLS (SEQ ID NO. 317); (5) dScCas9-FokI, HNHA, STO7D PAMBD replacement loop replacement longer linker, 2NLS (SEQ ID NO. 318) (Table 10A). Other PAM BD replacements were not found to have detectable activity.

[0663] Notably, dScCas9-FokI variants with deletions of the entire PAM binding loop or PAM binding domain were not found to have activity, demonstrating the requirement of replacing the PAM binding region with an appropriate NSDB. In many cases PAMBD replacements had different activities when different linker lengths were used, suggesting that proper orientation of the NSDB relative to the rest of the protein is essential to proper function. These results demonstrate the difficulty in abolishing the PAM binding regions in Cas-based nucleoproteins.

[0664] Two constructs with PAMBD replaced with Non-specific RVD from AvrBS3 protein family were further designed: dScCas9-FokI, HNHA, AvrBS3 PAMBD loop replacement, 2NLS (SEQ ID NO: 406), and dScCas9-FokI, HNHA, AvrBS3 PAMBD domain replacement, 2NLS (SEQ ID NO: 407). It should be noted that PAMBD loop as referred to herein comprises the amino acid sequence of residues 1330 to 1342, and the “PAMBD domain”, “entire PAMBD” OR “whole PAMBD” comprises the amino acid residues 1228 to 1343 of the ScCas9 (of SEQ ID NO. 258).

[0665] In addition, six constructs were further designed with PAMBD replaced with Sto7 (SEQ ID NO:433, 434), HMGN (SEQ ID NO:435,436), and StkC (SEQ ID NO:437,438). As shown in Table 10B below, replacement of whole PAMBD with Sto7 that had longer linkers resulted in a dScCasFok with gene editing efficiency of 0.45% (SEQ ID NO: 433). Replacement of PAMBD loop with HMGN resulted in a dScCasFok with gene editing efficiency of 0.54% (SEQ ID NO: 435). Replacement of either PAMBD loop or entire PAMBD with StkC resulted in a dScCasFok with gene editing efficiency of 0.18% (SEQ ID NOs:437, 438). These results illustrate the general concept that replacing the PAM with non-specific DNA binding domains can result in functional dScCasFok variants.

TABLE 10B
Gene editing efficiencies of PAM BD replacement constructs

| | Construct | editing % |
|---|---|---|
| Description | (SEQ ID NO) | (ddPCR#81) |
| SpCas9, SV40 + nucleoplasmin NLS | 7665 (257) | 42.99% |
| dScCasFok, SV40 NLS | 11241 (2) | 21.24% |
| dScCasFok, HNHΔ, whole PAMBD replaced with | 14268 (433) | 0.45% |
| Sto7, longer linkers, , SV40 + nucleoplasmin NLS | | |
| dScCasFok, HNHΔ, PAMBD loop replaced with | 14269 (434) | 0.02% |
| Sto7, longer linkers, SV40 + nucleoplasmin NLS | | |
| dScCasFok, HNHΔ, PAMBD loop replaced with | 14275 (435) | 0.54% |
| HMGN, SV40 + nucleoplasmin NLS | | |
| dScCasFok, HNHΔ, whole PAMBD replaced with | 14411 (436) | 0.01% |
| HMGN, SV40 + nucleoplasmin NLS | | |
| dScCasFok, HNHΔ, PAMBD loop replaced with | 14276 (437) | 0.18% |
| StkC, SV40 + nucleoplasmin NLS | | |
| dScCasFok, HNHΔ, whole PAMBD replaced with | 14277 (438) | 0.18% |
| StkC, SV40 + nucleoplasmin NLS | | |

Editing efficiency was quantified by ddPCR (ddPCR# #81 results are shown). NLS = Nuclear localization sequence.

[0666] The best PAM replacement constructs may be combined with the best HNH deletions (Table 11), the best Sc loop deletions/mutations (Table 9), and ancestral mutations (Table 18), in order to create PAM-replaced dCasFok variants without HNH or Sc loop, and stabilized by ancestral mutations. Candidate constructs were constructed and tested by ddPCR and the results are shown in Table 10C, and FIGS. 3 and 4. More specifically, the NHEJ erroneous repair percentages in the targeted human Myeloperoxidase (MPO) gene, was assayed by ddPCR for different dScCas9-FokI derivatives at two timepoints (76 hrs or 120 hrs post transfection) in two separate biological experiments. All constructs in FIG. 3, have an NNG PAM, a combination of an SV40 and an SV40-derived bipartite Nuclear Localization Signal (NLS), a deletion of the scLoop and the Rec domain ancestral mutations. The constructs presented in FIG. 4 have a mutated ScCas9 “scLoop”, an SV40-Nuclear Localization Signal (NLS) combined with a nucleoplasmin NLS, an HNH deletion and the ancestral Rec2 mutation.

[0667] Notably, many HNH-deleted, Sc loop-deleted/replaced, PAMBD replacement constructs were active in the ancestral mutation background. The variants with >1% gene editing activity included SEQ ID NO: 467, 474, 478, 479, 480, and included whole PAMBD or PAMBD loop replaced with Lac DNA binding domain, HMGN, SSO7D, and STO7, validating the approach of using non-specific DNA binding domains to replace the PAM domain

TABLE 10C
Gene editing efficiencies of PAM BD replacement constructs.

| | SEQ ID | TG | editing % |
|---|---|---|---|
| Description | NO | number | 120 hrs |
| Control | | | |
| Cas9 | 257 | 7665 | 50.38% |
| Cas9 | 257 | 7665 | 44.99% |
| dScCasFok, SV40 NLS | 2 | 11241 | 11.49% |
| dScCasFok, SV40 NLS | 2 | 11241 | 14.39% |
| dScCasFok, SV40 NLS | 2 | 11241 | 13.64% |
| dScCasFok, SV40 + SV40 bipartite NLS | 375 | 14280 | 19.66% |
| dScCasFok, SV40 + SV40 bipartite NLS | 375 | 14280 | 23.89% |
| dScCasFok, SV40 + SV40 bipartite NLS | 375 | 14280 | 23.59% |
| Sc Loop deletions | | | |
| dScCasFok, SV40 + bipartiteSV40, ancestral mutations | 450 | 14621 | 17.87% |
| in RuvC + REC1/2 domain, Scloop deletion | | | |
| dScCasFok, SV40 + bipartiteSV40, ancestral mutations | 451 | 14622 | 15.69% |
| in RuvC + REC1/2 domain, Scloop deletion, 6His tag | | | |
| dScCasFok, SV40 + bipartiteSV40, ancestral mutations | 452 | 14623 | 1.10% |
| in RuvC + REC1/2 domain, Scloop deletion, | | | |
| HNHdeletion | | | |
| dScCasFok, SV40 + bipartiteSV40, ancestral mutations | 453 | 14624 | 4.01% |
| in RuvC + REC1/2 domain, Scloop deletion, | | | |
| HNHdeletion, 6His tag | | | |
| dScCasFok, SV40 + bipartiteSV40, ancestral mutations | 454 | 14625 | 6.90% |
| in RuvC + REC1/2 domain, Scloop deletion, | | | |
| HNHdeletion, 6His tag | | | |
| dScCasFok, SV40 + bipartiteSV40, ancestral mutations | 455 | 14626 | 9.67% |
| in RuvC + REC1/2 domain, Scloop QQmutant, | | | |
| HNHdeletion, 6His tag | | | |
| dScCasFok, SV40 + bipartiteSV40, ancestral mutations | 456 | 14627 | 9.62% |
| in RuvC + REC1/2 domain, Scloop AAmutant, | | | |
| HNHdeletion, 6His tag | | | |
| dScCasFok, SV40 + bipartiteSV40, ancestral mutations | 457 | 14628 | 5.58% |
| in RuvC + REC1/2 domain, Scloop Sp Replacement, | | | |
| HNHdeletion, 6His tag | | | |
| dScCasFok, SV40 + bipartiteSV40, ancestral mutations | 458 | 14629 | 4.38% |
| in RuvC + REC1/2 domain, Scloop deletion, | | | |
| HNHdeletion, 6His tag | | | |
| dScCasFok, SV40 + bipartiteSV40, ancestral mutations | 459 | 14630 | 0.11% |
| in RuvC + REC1/2 domain, Scloop QQmutant, | | | |
| HNHdeletion, 6His tag | | | |
| dScCasFok, SV40 + bipartiteSV40, ancestral mutations | 460 | 14631 | 1.51% |
| in RuvC + REC1/2 domain, Scloop AAmutant, | | | |
| HNHdeletion, 6His tag | | | |
| HNH deletion + PAM replacement + Sc Loop | | | |
| deletion/mutation | | | |
| dScCasFok, SV40 + nucleoplasmin, ancestral mutations | 461 | 14637 | 0.00% |
| in RuvC + REC1/2 domain, Scloop deletion, HNH | | | |
| deletion, PAMBD loop replaced with Zinc finger | | | |
| dScCasFok, SV40 + nucleoplasmin, ancestral mutations | 462 | 14638 | 0.00% |
| in RuvC + REC1/2 domain, Scloop deletion, HNH | | | |
| deletion, whole PAMBD replaced with LacI DNA | | | |
| binding domain | | | |
| dScCasFok, SV40 + nucleoplasmin, ancestral mutations | 463 | 14639 | 0.00% |
| in RuvC + REC1/2 domain, Scloop deletion, HNH | | | |
| deletion, whole PAMBD replaced with SSO7D | | | |
| dScCasFok, SV40 + nucleoplasmin, ancestral mutations | 464 | 14640 | 0.16% |
| in RuvC + REC1/2 domain, Scloop deletion, HNH | | | |
| deletion, PAMBD loop replaced with HMGN | | | |
| dScCasFok, SV40 + nucleoplasmin, ancestral mutations | 465 | 14641 | 0.02% |
| in RuvC + REC1/2 domain, Scloop deletion, HNH | | | |
| deletion, whole PAMBD replaced with STO7 | | | |
| dScCasFok, SV40 + nucleoplasmin, ancestral mutations | 466 | 14642 | 0.00% |
| in RuvC + REC1/2 domain, Scloop QQmutation, HNH | | | |
| deletion, PAMBD loop replaced with Zinc finger | | | |
| dScCasFok, SV40 + nucleoplasmin, ancestral mutations | 467 | 14643 | 4.44% |
| in RuvC + REC1/2 domain, Scloop QQmutation HNH | | | |
| deletion, whole PAMBD replaced with LacI DNA | | | |
| binding domain | | | |
| dScCasFok, SV40 + nucleoplasmin, ancestral mutations | 468 | 14644 | 0.00% |
| in RuvC + REC1/2 domain, Scloop QQmutation, HNH | | | |
| deletion, whole PAMBD replaced with SSO7D | | | |
| dScCasFok, SV40 + nucleoplasmin, ancestral mutations | 469 | 14645 | 0.31% |
| in RuvC + REC1/2 domain, Scloop QQmutation, HNH | | | |
| deletion, PAMBD loop replaced with HMGN | | | |
| dScCasFok, SV40 + nucleoplasmin, ancestral mutations | 470 | 14646 | 0.00% |
| in RuvC + REC1/2 domain, Scloop QQmutation, HNH | | | |
| deletion, whole PAMBD replaced with STO7 | | | |
| dScCasFok, SV40 + nucleoplasmin, ancestral mutations | 471 | 14647 | 0.00% |
| in RuvC + REC1/2 domain, Scloop AAmutation, HNH | | | |
| deletion, PAMBD loop replaced with Zinc finger | | | |
| dScCasFok, SV40 + nucleoplasmin, ancestral mutations | 472 | 14648 | 0.01% |
| in RuvC + REC1/2 domain, Scloop AAmutation HNH | | | |
| deletion, whole PAMBD replaced with LacI DNA | | | |
| binding domain | | | |
| dScCasFok, SV40 + nucleoplasmin, ancestral mutations | 473 | 14649 | 0.03% |
| in RuvC + REC1/2 domain, Scloop AAmutation, HNH | | | |
| deletion, whole PAMBD replaced with SSO7D | | | |
| dScCasFok, SV40 + nucleoplasmin, ancestral mutations | 474 | 14650 | 1.02% |
| in RuvC + REC1/2 domain, Scloop AAmutation, HNH | | | |
| deletion, PAMBD loop replaced with HMGN | | | |
| dScCasFok, SV40 + nucleoplasmin, ancestral mutations | 475 | 14651 | 0.37% |
| in RuvC + REC1/2 domain, Scloop AAmutation, HNH | | | |
| deletion, whole PAMBD replaced with STO7 | | | |
| dScCasFok, SV40 + nucleoplasmin, ancestral mutations | 476 | 14652 | 0.88% |
| in RuvC + REC1/2 domain, Scloop SpReplacement, | | | |
| HNH deletion, PAMBD loop replaced with Zinc finger | | | |
| dScCasFok, SV40 + nucleoplasmin, ancestral mutations | 477 | 14653 | 0.00% |
| in RuvC + REC1/2 domain, Scloop SpReplacement | | | |
| HNH deletion, whole PAMBD replaced with LacI | | | |
| DNA binding domain | | | |
| dScCasFok, SV40 + nucleoplasmin, ancestral mutations | 478 | 14654 | 2.09% |
| in RuvC + REC1/2 domain, Scloop SpReplacement | | | |
| HNH deletion, whole PAMBD replaced with SSO7D | | | |
| dScCasFok, SV40 + nucleoplasmin, ancestral mutations | 479 | 14655 | 3.29% |
| in RuvC + REC1/2 domain, Scloop SpReplacement | | | |
| HNH deletion, PAMBD loop replaced with HMGN | | | |
| dScCasFok, SV40 + nucleoplasmin, ancestral mutations | 480 | 14656 | 1.17% |
| in RuvC + REC1/2 domain, Scloop SpReplacement | | | |
| HNH deletion, whole PAMBD replaced with STO7 | | | |

Editing efficiency was quantified by ddPCR (ddPCR#86 results are shown). NLS = Nuclear localization sequence.

[0668] PAM-independence of all constructs described here is tested using an assay such as the one described in Example 6.

### Example 3

### dCas-FokI Variants Optimized through Deletions

[0669] To reduce the size of the Cas variants of the invention and fusion proteins thereof, different regions of the Cas nucleoprotein are next deleted. Reduction of the protein size is beneficial for, among other reasons, to allow the construct to be placed in a recombinant Adeno Associated Virus (AAV) vector. Such vectors are considered highly efficient and safer than other viral delivery options. Moreover, AAVs can be targeted in vivo to specific tissues [10]. The maximum AAV packaging capacity is about 4.5 kb, too small for dSpCas9-FokI or dScCas9-FokI. A working example of a 4.437 kb HNH deletion variant is next constructed by the invention. Specifically, an HNH-nuclease deleted ScCas9-FokI (dHNH-dScCas9-FokI) is provided herein.

[0670] The HNH is one of the two nucleases of Cas9 proteins. To create “dead” version of this protein, substitutions in the catalytic residues in HNH and RUVC nuclease domains have been shown, i.e. for ScCas9 the mutations shown were D 10A and H849A (Chatterjee et al., 2018, Science Advances, Vol. 4, no. 10, eaau0766). As no nuclease activity is required for Cas when substituted with a FokI nuclease domain, the HNH nuclease domain is redundant and has been previously similarly removed from SpCas9 in a transcriptional-activator domain dCas9 fusion protein. Constructs comprising the nucleic acid sequence as denoted by SEQ ID NO. 9 (Plasmid 11248 with guide), and SEQ ID NO. 13 (Plasmid 11254 with no guide), were prepared as described in experimental procedures. These constructs encode the dScCas9-FokI dHNH chimera that comprise the amino acid sequence as denoted by SEQ ID NO. 10 (with and with no guide, respectively).

[0671] EMX1 gene NHEJ erroneous repair was tested in Hek293 cells, harvested 72 hours after transfection with plasmids encoding the protein and the SCNAs. Constructs with deleted HNH domain (dHNH) had significant genome editing activity with an SCNA gap of 15 (SEQ ID NO. 12) and greatly reduced activity with a gap of 27 (SEQ ID NO. 11). A ddPCR analysis was made using BioRad software counting only single-template droplets which were HEX-negative FAM positive. This was followed by Poisson correction for inclusion of the expected number of 2,3,4 etc template containing droplets (see “tails” in FIG. 5B) as calculated from the empty/full droplet ratio multiplied by the percentage of single template NHEJ erroneous repair droplets (top left quarters in plots of FIG. 5B) with a 95% confidence level. A mixture of 15- and 27-gap SCNAs gave intermediate activity as could be expected from competition between the protein and RNA components, see FIG. 5A. However, compared to dScCas9-Fok this construct had lower activity. To further improve the activity of the size-reduced chimera, additional constructs encoding variety of Cas9 chimeras with different deletions, were designed. These constructs encode the following size-reduced dScCas9-Fok chimeras: dScCas9-FokI.dHNH.dREC2 as denoted by SEQ ID NO: 14, dScCas9-FokI.dHNH.dFLEX as denoted by SEQ ID NO: 15, dScCas9-FokI.dREC2.dFLEX as denoted by SEQ ID NO. 16 and dScCas9-FokI.dHNH.dREC2.dFLEX as denoted by SEQ ID NO. 17.

[0672] Without being bound by the theory, it was hypothesized that HNH domain may also be replaced by peptides of various sequences. These peptides include shorter (about 1-5 residues) or longer (about 6-20 residues or longer) linkers and linkers with positively charged amino acids (such as Lys and Arg residues), deletions of different sizes (either larger or smaller), and linkers derived from the H-NS nucleoid-associated protein (AAVKSGTKAKRAQRP, as denoted by SEQ ID NO: 485). Constructs were designed and synthesized, editing efficiency was tested, and the results are shown in Table 11. SCNAs targeting the human MPO gene exon 1 were encoded by plasmid GeneMsgRNA15E1. MPO gene NHEJ erroneous repair was tested in Hek293 cells, harvested 72 hours after transfection with plasmids encoding the protein and the SCNAs. It appears that the proposed HNH replacements had detectable editing activity, and that this activity varied between different replacements. Highest activity was observed by replacing HNH domain with a longer linker (“dScCasFok, HNHΔ with longer linkers, 2NLS”, SEQ ID NO: 342), which edited 0.82% of cells.

TABLE 11
Gene editing efficiencies of HNH domain replacement constructs.

| | Construct | editing |
|---|---|---|
| Description | (SEQ ID NO) | % |
| dScCasFok, HNHΔ with longer linkers (GGSAGGTGGSGG, | 14001 (342) | 0.82% |
| SEQ ID NO: 306), 2NLS | | |
| dScCasFok, HNHΔ replaced with SSB, 2NLS | 14002 (343) | 0.20% |
| dScCasFok, HNHΔ with larger deletion (18 additional | 14003 (344) | 0.34% |
| residues), 2NLS | | |
| dScCasFok, HNHΔ with positively charged linker | 14004 (349) | 0.77% |
| (GGKARGKGGSGG, SEQ ID NO: 307), 2NLS | | |
| dScCasFok, HNHΔ with short positively charged linker | 14005 (350) | 0.48% |
| (GKSKG, SEQ ID NO: 481), 2NLS | | |
| dScCasFok, HNHΔ with H-NS linker | 14007 (351) | 0.04% |
| (AAVKSGTKAKRAQRP, SEQ ID NO: 485), 2NLS | | |

Editing efficiency was quantified by ddPCR (ddPCR#73 results are shown). NLS = Nuclear localization sequence.

[0673] The HNH domain may also be replaced by domains that are smaller or have different properties. These domains may comprise single-stranded DNA binding protein (SSB) which binds single-stranded DNA, sticky C which binds chromatin. Moreover, HNH domain deletions and replacements may be done in combination with mutations that may enhance stability/expression/activity, which may include ancestral mutations (see Example 16). Constructs were designed and synthesized, editing efficiency was tested, and the results are shown in Table 12. SCNAs targeting the human MPO gene exon 1 were encoded by plasmid GeneMsgRNA15E1. MPO gene NHEJ erroneous repair was tested in Hek293 cells, harvested 72 hours after transfection with plasmids encoding the protein and the SCNAs. As a positive control, a variant of dScCasFok (SEQ ID NO. 375) was used with two nuclear localization sequences, SV40 at the N-terminus (SEQ ID NO. 400), and a bipartite SV40 (SEQ ID NO. 402) at the C-terminus. Another control was a dScCasFok variant with a C-terminal 6× His tag (SEQ ID NO. 403).

[0674] It was found that the proposed HNH replacements had detectable editing activity, and that this activity varied between different replacements. Interestingly, ancestral mutations in the REC domain of Cas9 increased the activity of HNH domain deletions. For example the “dScCasFok, HNHΔ with longer linker, SV40+bipartiteSV40 NLS” (SEQ ID NO: 379) had an average editing efficiency of 1.27%, but when ancestral mutations were incorporated in the RuvC and Rec1/2 domains its activity increased to an average editing efficiency of 8.07% (SEQ ID NO: 387) (Table 12). These results show that it is possible to remove the HNH domain and retain high activity by proper choice of linker length and composition. Moreover, ancestral mutations may be important for such modifications, possibly through their effects on the stability, expression, or activity of the dCasFok protein.

TABLE 12
Gene editing efficiencies of HNH domain replacement constructs. ND = not done

| | Construct | editing % | editing % |
|---|---|---|---|
| Description | (SEQ ID NO) | (ddPCR76) | (ddPCR81) |
| dScCasFok, SV40 + bipartite SV40 NLS | 14280 (375) | 29.08% | 26.26% |
| dScCasFok, SV40 + bipartite SV40 NLS, | 14412 (376) | 30.81% | 26.08% |
| 6xHis | | | |
| dScCasFok, ancestral RuvC + Rec1/2domain, | 14314 (377) | 25.51% | 21.25% |
| SV40 and bipartite SV40 NLS | | | |
| dScCasFok, HNHΔ, SV40 + bipartiteSV40 | 14297 (378) | 2.88% | 2.96% |
| NLS | | | |
| dScCasFok, HNHΔ with longer linker, | 14298 (379) | 2.54% | 0% |
| SV40 + bipartiteSV40 NLS | | | |
| dScCasFok, HNH replaced with SSB, | 14299 (380) | 0.00% | ND |
| SV40 + bipartiteSV40 NLS | | | |
| dScCasFok, HNHΔ with longer deletion | 14300 (381) | 1.58% | ND |
| SV40 + bipartiteSV40 NLS | | | |
| dScCasFok, HNHΔ with longer positively | 14301 (382) | 4.05% | 3.98% |
| charged linker, SV40 + bipartiteSV40 NLS | | | |
| dScCasFok, HNHΔ with shorter positively | 14302 (383) | 3.01% | 3.06% |
| charged linker, SV40 + bipartiteSV40 NLS | | | |
| dScCasFok, HNH replaced with StkC, | 14303 (384) | 1.51% | ND |
| SV40 + bipartiteSV40 NLS | | | |
| dScCasFok, HNHΔ with HNS linker, | 14304 (385) | 1.69% | ND |
| SV40 + bipartiteSV40 NLS | | | |
| dScCasFok, ancestral RuvC + Rec1/2, HNHΔ, | 14315 (386) | 5.49% | 4.09% |
| SV40 + bipartiteSV40 NLS | | | |
| dScCasFok, ancestral RuvC + Rec1/2, HNHΔ | 14316 (387) | 9.59% | 6.54% |
| with longer linker, SV40 + bipartiteSV40 | | | |
| NLS | | | |
| dScCasFok, ancestral RuvC + Rec1/2, HNH | 14317 (388) | 4.78% | ND |
| replaced with SSB, SV40 + bipartiteSV40 | | | |
| NLS | | | |
| dScCasFok, ancestral RuvC + Rec1/2, HNHΔ | 14318 (389) | 4.84% | ND |
| with longer deletion SV40 + bipartiteSV40 | | | |
| NLS | | | |
| dScCasFok, ancestral RuvC + Rec1/2, HNHΔ | 14319 (390) | 4.10% | 4.69% |
| with longer positively charged linker, | | | |
| SV40 + bipartiteSV40 NLS | | | |
| dScCasFok, ancestral RuvC + Rec1/2, HNHΔ | 14320 (391) | 3.89% | 4.61% |
| with shorter positively charged linker, | | | |
| SV40 + bipartiteSV40 NLS | | | |
| dScCasFok, ancestral RuvC + Rec1/2, HNH | 14321 (392) | 1.79% | ND |
| replaced with StkC, SV40 + bipartiteSV40 | | | |
| NLS | | | |
| dScCasFok, ancestral RuvC + Rec1/2, HNHΔ | 14322 (393) | 4.53% | ND |
| with HNS linker, SV40 + bipartiteSV40 NLS | | | |

Editing efficiency was quantified by ddPCR (ddPCR#76 and #81 results are shown). NLS = Nuclear localization sequence.

[0675] Thus, from the results gathered from several tables above and below it may be seen that several optimal combinations—having increased activity—may be assembled into a single optimal construct, i.e. one containing a combination of dscCas9-Fok with both a ‘SV40NLS+bipartite SV4ONLS’ and ‘HMGN’, or in the delta-HNH (HNHA) background one with a ‘longer linker’, a ‘SV4ONLS+bipartite SV4ONLS’, and an ‘ancestral RuvC+REC1/2’ (SEQ ID NO. 387, table 12).This specific combination (SEQ ID NO. 387), for example, shows how several deleterious mutations in one background, when combined, can synergistically enhance performance in another.

[0676] Modifications that improve activity may be combined to create improved dScCasFok variants with high activity. These modifications may be combined with PAMBD replacement modifications (see Example 2). Several variants were designed:

[0677] dScCasFok, N-terminal HMGN, ancestral RuvC+Rec1/2, HNHΔ with longer linker, SV40 and bipartite SV40 NLS (SEQ ID NO. 426); dScCasFok, ancestral RuvC+Rec1/2, HNHΔ with longer linker, PAMBD loop replaced with Zinc Finger +longer linker, SV40 and bipartite SV40 NLS (SEQ ID NO. 427); dScCasFok, ancestral RuvC+Rec1/2, HNHΔ with longer linker, PAMBD replaced with Lac repressor DBD, SV40 and bipartite SV40 NLS (SEQ ID NO. 428); dScCasFok, ancestral RuvC+Rec1/2, HNHΔ with longer linker, PAMBD replaced with SSO7D, SV40 and bipartite SV40 NLS (SEQ ID NO. 429); dScCasFok, N-terminal HMGN, ancestral RuvC+Rec1/2, HNHΔ with longer linker, PAMBD loop replaced with Zinc Finger, SV40 and bipartite SV40 NLS (SEQ ID NO. 430); dScCasFok, N-terminal HMGN, ancestral RuvC+Rec1/2, HNHΔ with longer linker, PAMBD replaced with Lac repressor DBD, SV40 and bipartite SV40 NLS (SEQ ID NO. 431) and dScCasFok, N-terminal HMGN, ancestral RuvC+Rec1/2, HNHΔ with longer linker, PAMBD replaced with SSO7D, SV40 and bipartite SV40 NLS (SEQ ID NO. 432).

### Example 4

### dCas-FokI Division Using a Split-Intein System

[0678] dScCasFok may also be divided into two polypeptides (or sequences encoding them) that can be reconstituted using inteins which are intervening protein domains that can undergo a posttranslational autoprocessing termed protein splicing. This partition has been shown to work for SpCas9 (Truong et al, 2015, Nucleic Acids Res, 43:6450-8). A split-intein system was designed for dScCas9Fok that significantly reduces the size of the individual coding nucleotide sequences that need to be packed in systems like AAV. The N-terminal half of the DnaE intein from Nostoc punctiforme was fused to residues 1-809 of dScCasFok to make dScCasFok N-terminal intein (SEQ ID NO:353), and the C-terminal half of the DnaE intein from Nostoc punctiforme was fused to residues 810-1601 of dScCasFok to make dScCasFok C-terminal intein (SEQ ID NO:352). SV40-based NLS sequences were added to the N- and C-termini of each construct. Constructs were designed and synthesized, editing efficiency was tested, and the results are shown in Table 13. SCNAs targeting the human MPO gene exon 1 were encoded by plasmid GeneMsgRNA15E1. MPO gene NHEJ erroneous repair was tested in Hek293 cells, harvested 96 hours after transfection with plasmids encoding the proteins and the SCNAs.

TABLE 13
Gene editing efficiencies of dScCasFok split-intein constructs.

| Description | Construct (SEQ ID) | editing % |
|---|---|---|
| SpCas9 | 13681 (257) | 37 |
| dScCasFok, 1 NLS | 11241 (2) | 18 |
| dScCasFok, 2 NLS | 14280 (375) | 26 |
| Guide only | — | 0 |
| dScCasFok N-terminal intein, 2NLS variant | 14870 (353) | 0 |
| dScCasFok C-terminal intein, 2NLS variant | 14806 (352) | 0 |
| dScCasFok C and N-terminal inteins, 2NLS variants | 14806, 14870 | 34 |
| | (352 + 353) | |

Editing efficiency was quantified by ddPCR (ddPCR#96 results are shown). NLS = Nuclear localization sequence.

[0679] From these results, that are further presented by FIG. 15, it can be seen that splitting dscCasFok into two polypeptides, following their expression and reconstitution in human cells, is thus a viable strategy for delivery of large proteins such as dscCas-Fok. Gene editing efficiency of the reconstituted protein from inteins (34%) was observed to be higher than the entire dScCasFok (26%), possibly due to concentration or differences in nuclear import efficiency. Moreover, neither intein fragment had activity on its own showing the necessity of the intact protein being reconstituted from the fragments.

### Example 5

### Plant Optimized Chimeric Editing Systems

[0680] Induction of predetermined chromosomal double strand breaks (DSBs) in living cells or whole plants of Arabidopsis

[0681] The enzyme Phytoene Desaturase (PDS) is involved in the conversion of phytoene ζ-carotene in carotenoid biosynthesis. Disruption of Arabidopsis phytoene desaturase results in albino and dwarf phenotypes. This phenotype is explained by impaired chlorophyll, carotenoid, and gibberellin biosynthesis. Thus, a mutation in this gene is phenotypically detectable.

[0682] To establish and develop effective editing systems in plants, the inventors next adapted the gene editing systems of the invention for plant cells using plant promoters, SCNAs and plant target genes. More specifically, the inventors induce a chromosomal double-strand break (DSB) in the PDS gene in order to create a point mutation through a frameshift, thus knocking out the function of the gene endogenously by utilizing the NHEJ pathway using the programmable molecular machine.

[0683] In addition, the inventors specifically induce a chromosomal double-strand break (DSB) in the PDS gene in order to create an Insertion of a mCherry Donor sequence into an endogenous PDS sequence to knock out PDS by assisted homologous recombination using the programmable molecular machine. Tobacco protoplasts have been similarly used with ZFNs to insert a reporter gene into a specific location in a chromosome (Wright et al, 2005, Plant J, 44:693-705), however, in contrast, an endogenous Arabidopsis gene and not a transgene sequence is targeted by the present invention. Nucleic acids in Human or animal cells may similarly be targeted. In the examples shown here the protein moiety is expressed by way of plant promoters and thus relevant for plants.

[0684] Delivery of the editing systems of the invention to plants is performed by Agrobacterium transformation via floral dip, detection is by identifying white seedlings.

[0685] In another embodiment Plasmid Delivery is by PEG to protoplasts.

[0686] To target genomic DNA in-vivo to knock out PDS in plants and/or to insert the reporter gene into the targeted PDS gene, a visual assay was designed where seedling offspring of the targeted plants are white and/or express the reporter fluorophore or alternatively an Arabidopsis protoplast based assay whereby plasmid delivery is mediated by PEG and the detection is done by extracting and examining the genomic DNA of the PDS gene flanking the mutation/deletion/insertion site. In the former example the delivery method used is Agrobacterium mediated T-DNA transfer through floral-dip. In this bioassay the inventors deliver the system to the Arabidopsis flower with Agrobacterium carrying T-DNA. In the latter example the inventors use an Arabidopsis protoplast-based bioassay. In this bioassay the inventors deliver to these protoplasts a plasmid. In either assays the inventors deliver a T-DNA or plasmid respectively, expressing the molecular machine in-vivo and co-delivered also with a T-DNA or a plasmid encoding a pair of sgRNAs respectively, to target TCCAGATGAAAGTGC (as denoted by SEQ ID NO. 49) site on exon 14 to disrupt PDS activity. The PAM target sequence is NNG on both sides flanking the sgRNAs flanking this target site.

[0687] The sgRNAs for this example are arranged on opposing target strands, PAM-out.

[0688] The use of a pair of sgRNAs, for example, the right and the left target sgRNAs (as denoted by SEQ ID NOs.50 and 51, respectively), with an obligatory-dimerizing nuclease should provide greatly enhanced specificity and reduce off-target cleavage in the plant and thus reduce off-target mutations in its offspring.

[0689] Several methods of delivery of the sgRNA and the protein to plant cells can be used. One such method which is DNA-free and thus not susceptible to unwanted DNA integration is use of Ribonucleic-acid-protein complex (RNP) whereby the sgRNA can be supplied as synthetic RNA together with the protein (RNP) and be transfected to protoplasts (Murovec et al., Front Plant Sci. 2018; 9: 1594.).

[0690] More commonly, DNA delivery can be used avoiding the difficulties posed by regeneration of protoplasts.

[0691] For plasmid or agrobacterium delivery DNA encoding the following sgRNAs regulated by a pair of tail-to-tail PolIII plant promoters is used.

[0692] More specifically, the NekP-AtU61P cassette is used, where N denotes the sgRNA sequence, and guttagagetagaaatagcaagttaaaataaggetagtecguatcaacttgaaaaagtggcaccgagteggtgc (of SEQ ID NO. 52) denotes the Right Cas9 sgRNA scaffold and gcaccgacteggtgccactuttcaagttgataacggactagccuatutaacttgetatuctagactaaaac (of SEQ ID NO. 53) denotes the Left Cas9 sgRNA scaffold which is the same sequence but in opposite orientation to avoid promoter interference, thereby creating the sequence:

Ggatccatttaaattctagaggcgcgccaaaaaaagcaccgactcggtgccactttttcaagttgataacggactagccttattttaactt
gctatttctagctctaaaacNNNNNNNNNNNNNNNNNNNNaatcgctatgtcgactctatcattatataaactaagctgcta
tatatcacctgatcgatgtgggacttttgatcactccagaaatctcaaaattccggcagaacaattttgaatctcgatccgtagaaacgag
acggtcattgttttagttccaccacgattatatttgaaatttacgtgagtgtgagtgagacttgcataagaaaataaaatctttagttgggaa
aaaattcaataatataaatgggcttgagaaggaagcgagggataggcctttttctaaaataggcccatttaagctattaacaatcttcaa
aagtaccacagcgcttaggtaaagaaagcagctgagtttatatatggttagagacgaagtagtgattNNNNNNNNNNNNNN
NNNNNN [symbol] tttttt
ttaattaatagggataacagggtaatta, as denoted by SEQ ID NO. 54.

[0693] To target the PDS gene, the NekP-AtU61P that contain PDS specific sgRNA, is used

ggatccatttaaattctagaggcgcgccaaaaaaagcaccgactcggtgccactttttcaagttgataacggactagccttattttaactt
gctatttctagctctaaaacTGTCCCATTAGTTCACAACCaatcgctatgtcgactctatcattatataaactaagctgctata
tatcacctgatcgatgtgggacttttgatcactccagaaatctcaaaattccggcagaacaattttgaatctcgatccgtagaaacgaga
cggtcattgttttagttccaccacgattatatttgaaatttacgtgagtgtgagtgagacttgcataagaaaataaaatctttagttgggaaa
aaattcaataatataaatgggcttgagaaggaagcgagggataggcctttttctaaaataggcccatttaagctattaacaatcttcaaa
agtaccacagcgcttaggtaaagaaagcagctgagtttatatatggttagagacgaagtagtgattCTCCAAAAACCCGTTT
TGAT [symbol] ttttttttaa
ttaatagggataacagggtaatta, as denoted by SEQ ID NO. 55.

[0694] In addition, DNA expression construct comprising the nucleic acid sequence as denoted by SEQ ID NO. 60, that encodes the dScCas9-FokI protein of SEQ ID NO. 56, is used. This DNA expression cassette is composed of 2X35SP from pSAT6, as denoted by SEQ ID NO. 57, the Plant optimized dScCAS9-FokI, as denoted by SEQ ID NO. 58, and the 35ST from pSAT6, as denoted by SEQ ID NO. 59.

[0695] Donor DNA sequence comprising PD-mCherry-S encoding ORF of SEQ ID NO. 61, is used for NHEJ repair pathway, and DONOR PD-MCHERRY-S is used for homologous recombination repair pathway of SEQ ID NO. 62. The mCherry sequence is flanked by PDS sequences at the desired target site

[0696] SEQ ID NO. 55 and 60 encoding to SCNAs and Nuclease expression cassettes are ordered from GeneArt in pMA Km plasmid, where cassettes are flanked by I-SceI and pI-PspI respectively. The Nuclease cassette contains also a MluI site: pI-PspI-MluI-[Cassette]-pI-PspI. Each cassette was inserted to pPZP-RCS (SEQ ID NO. 295) into corresponding restriction site. The mCherry donor DNA cassettes (SEQ ID NO. 61 and 62) were ordered similarly but with MluI flanking the cassettes (MluI-Cassette-MluI).

[0697] SEQ ID NO. 61 was cloned into Ascl site of pPZP-RCS and introduced with the SCNA-Nuclease T-DNA by co-inoculation. The other donor DNA cassette (SEQ ID NO. 62) was introduced into the SCNA-Nuclease construct into MluI site.

[0698] For experiments where the PDS is knocked out (NHEJ), DNA from pooled protoplasts is analysed by PCR and restriction fragment analysis of the PCR product. PCR is conducted with the primers Primer2F and Primer2R, as denoted by SEQ ID NO. 63 and SEQ ID NO. 64, respectively.

[0699] Abolishment of cleavage with Hpyl88III in at least a portion of the amplified DNA indicates at least some successful gene targeting and directed mutation of the genomic template. Digestion of WT PCR product shows two bands of 112 and 200 bp while a targeted product shows different bands, typically single band sized dictated by the mutation occurred in the cell.

[0700] In experiments where a reporter gene is inserted using homologous recombination, a Donor DNA encoding mCherry is fused in frame to the endogenous PDS gene for homologous recombination repair mechanism, or simple mCherry for NHEJ mechanism. In both repair pathways, a successful targeting event results in a mRNA encodes a disrupted PDS fused to a full mCherry immediately followed by a STOP codon (“PD-mCherry”). Protoplasts suspended in W5 solution are screened for mCherry activity three days after transfection using an automated flow-cytometer (FACS) machine. PDS-modified protoplasts are detected by FACS analysis, where an insertion of mCherry donor DNA is detectable by mCherry fluorescence using a 561 nm excitation wavelength and detection of 590-630 nm emission. Threshold and compensation factors will be set to exclude any false positives.

[0701] Further characterization in the experiments is achieved by regenerating protoplasts on suitable media and examining their subsequent phenotypic character, where bleached plants or calli indicate successful gene-targeting.

[0702] In experiments using Agrobacterium transformation, the resulted product is not a single modified cell but a seed. The seeds are germinated and a targeted plant show white cotyledons and/or mCherry fluorescence.

[0703] It should be noted that representative population of cells treated under the conditions of the current example were taken for analysis using a method for off-target detection cited in the methods section. Due to use of dual RNA targeting, less off-target cleavage compared to Cas9 is expected.

### Example 6

### Gap Optimization and PAM Bias/Independence Detection

[0704] In order to test activity of different nucleases and different sgRNA combinations on different targets, an in-vitro assay that tests digestion kinetics is used. This test allows (A) PAM requirement elucidation of different proteins, (B) optimization of SCNA (sgRNA) gaps by using the same sgRNAs on targets whereby the SCNA-binding site on the target is placed at variable distances such as 15 nt apart, and nearer or further apart, and (C) use of different RNA-guided nucleases and optimization of their protein sequence.

[0705] Protein expression (TNT® SP6 High-Yield Wheat Germ Protein E L3261), is performed as described in Experimental procedures for Example 6 (Table 5).

[0706] Template DNA for TNT protein expression system is a PCR template prepared by performing PCR on 10916 (original dscCAS9-Fok construct, SEQ ID NO. 1) with primers 3241.SP6P SV4ONLS F, as denoted by SEQ ID NO. 65 and 3242.CASR, as denoted by SEQ ID NO. 66. The 10916 plasmid (of SEQ ID NO. 1) for human expression of dScCas9-FokI, is used here as an example for a template for amplifying the PCR product used in SP6 in-vitro transcription and translation of an RNA guided nuclease.

[0707] The sgRNA sequences 3243EMX115R, as denoted by SEQ ID NO. 67 and 3244EMX115L, as denoted by SEQ ID NO. 68, are used.

[0708] To create a plasmid with a suitable digestion pattern, a PCR product derived from part of the Human EMX1 gene was cloned as a target site into pGEM-T Easy plasmid vector (Promega). For the reduced-PAM (NNG) dScCas9-FokI the following insert (Expected size 235 bp) is prepared by PCR on Human gDNA with primers 3042 and 3240, as denoted by SEQ ID Nos. 67 and 68, respectively.

[0709] Construction of Different PAM Target Sequences

[0710] To create target plasmids with different PAM sites, the inventors amplify a product derived from part of the Human EMX1 gene as a target site into pGEM-T Easy plasmid vector (Promega). In this example the gap between the sgRNAs on the target DNA is set at 15 bp. As a 15 nt gap was found to be efficient in human cells with dScCas9-FokI, this example is used for this in-vitro assay also. To test different gaps an artificial PCR template can be produced adding or removing nucleotides in the gap between the sgRNA binding sites, this template also amplified by the primers below as needed. The inserts are variable according to the desired PAM sequence encoded the primers on both ends. PCR on human gDNA with the listed primer combinations (i.e. 1R with 1L etc.) should yield 64 products of 61 bp (for the 15 nt gap).

[0711] Right primers containing 64 PAM combinations, as denoted by SEQ ID NOs. 71-134, and presented by Table 14, left primers containing 64 PAM combinations, as denoted by SEQ ID NOs. 135-198, and presented by Table 15.

TABLE 14
Right primers

| primer | sequence | SEQ ID NO. |
|---|---|---|
| 1R | TTTggtggaggagtgcaggctct | 71 |
| 2R | ATTggtggaggagtgcaggctct | 72 |
| 3R | CTTggtggaggagtgcaggctct | 73 |
| 4R | GTTggtggaggagtgcaggctct | 74 |
| 5R | TATggtggaggagtgcaggctct | 75 |
| 6R | AATggtggaggagtgcaggctct | 76 |
| 7R | CATggtggaggagtgcaggctct | 77 |
| 8R | GATggtggaggagtgcaggctct | 78 |
| 9R | TCTggtggaggagtgcaggctct | 79 |
| 10R | ACTggtggaggagtgcaggctct | 80 |
| 11R | CCTggtggaggagtgcaggctct | 81 |
| 12R | GCTggtggaggagtgcaggctct | 82 |
| 13R | TGTggtggaggagtgcaggctct | 83 |
| 14R | AGTggtggaggagtgcaggctct | 84 |
| 15R | CGTggtggaggagtgcaggctct | 85 |
| 16R | GGTggtggaggagtgcaggctct | 86 |
| 17R | TTAggtggaggagtgcaggctct | 87 |
| 18R | ATAggtggaggagtgcaggctct | 88 |
| 19R | CTAggtggaggagtgcaggctct | 89 |
| 20R | GTAggtggaggagtgcaggctct | 90 |
| 21R | TAAggtggaggagtgcaggctct | 91 |
| 22R | AAAggtggaggagtgcaggctct | 92 |
| 23R | CAAggtggaggagtgcaggctct | 93 |
| 24R | GAAggtggaggagtgcaggctct | 94 |
| 25R | TCAggtggaggagtgcaggctct | 95 |
| 26R | ACAggtggaggagtgcaggctct | 96 |
| 27R | CCAggtggaggagtgcaggctct | 97 |
| 28R | GCAggtggaggagtgcaggctct | 98 |
| 29R | TCAggtggaggagtgcaggctct | 99 |
| 30R | ACAggtggaggagtgcaggctct | 100 |
| 31R | CCAggtggaggagtgcaggctct | 101 |
| 32R | GCAggtggaggagtgcaggctct | 102 |
| 33R | TTCggtggaggagtgcaggctct | 103 |
| 34R | ATCggtggaggagtgcaggctct | 104 |
| 35R | CTCggtggaggagtgcaggctct | 105 |
| 36R | GTCggtggaggagtgcaggctct | 106 |
| 37R | TACggtggaggagtgcaggctct | 107 |
| 38R | AACggtggaggagtgcaggctct | 108 |
| 39R | CACggtggaggagtgcaggctct | 109 |
| 40R | GACggtggaggagtgcaggctct | 110 |
| 41R | TCCggtggaggagtgcaggctct | 111 |
| 42R | ACCggtggaggagtgcaggctct | 112 |
| 43R | CCCggtggaggagtgcaggctct | 113 |
| 44R | GCCggtggaggagtgcaggctct | 114 |
| 45R | TGCggtggaggagtgcaggctct | 115 |
| 46R | AGCggtggaggagtgcaggctct | 116 |
| 47R | CGCggtggaggagtgcaggctct | 117 |
| 48R | GGCggtggaggagtgcaggctct | 118 |
| 49R | TTGggtggaggagtgcaggctct | 119 |
| 50R | ATGggtggaggagtgcaggctct | 120 |
| 51R | CTGggtggaggagtgcaggctct | 121 |
| 52R | GTGggtggaggagtgcaggctct | 122 |
| 53R | TAGggtggaggagtgcaggctct | 123 |
| 54R | AAGggtggaggagtgcaggctct | 124 |
| 55R | GACggtggaggagtgcaggctct | 125 |
| 56R | GACggtggaggagtgcaggctct | 126 |
| 57R | TCCggtggaggagtgcaggctct | 127 |
| 58R | ACCggtggaggagtgcaggctct | 128 |
| 59R | CCCggtggaggagtgcaggctct | 129 |
| 60R | GCCggtggaggagtgcaggctct | 130 |
| 61R | TCCggtggaggagtgcaggctct | 131 |
| 62R | ACCggtggaggagtgcaggctct | 132 |
| 63R | CCCggtggaggagtgcaggctct | 133 |
| 64R | GCCggtggaggagtgcaggctct | 134 |

TABLE 15
Left Primers

| primer | sequence | SEQ ID NO. |
|---|---|---|
| 1L | TTTtagaaactcgtagagtccca | 135 |
| 2L | ATTtagaaactcgtagagtccca | 136 |
| 3L | CTTtagaaactcgtagagtccca | 137 |
| 4L | GTTtagaaactcgtagagtccca | 138 |
| 5L | TATtagaaactcgtagagtccca | 139 |
| 6L | AATtagaaactcgtagagtccca | 140 |
| 7L | CATtagaaactcgtagagtccca | 141 |
| 8L | GATtagaaactcgtagagtccca | 142 |
| 9L | TCTtagaaactcgtagagtccca | 143 |
| 10L | ACTtagaaactcgtagagtccca | 144 |
| 11L | CCTtagaaactegtagagtccca | 145 |
| 12L | GCTtagaaactcgtagagtccca | 146 |
| 13L | TGTtagaaactcgtagagtccca | 147 |
| 14L | AGTtagaaactcgtagagtccca | 148 |
| 15L | CGTtagaaactcgtagagtccca | 149 |
| 16L | GGTtagaaactcgtagagtccca | 150 |
| 17L | TTAtagaaactcgtagagtccca | 151 |
| 18L | ATAtagaaactcgtagagtccca | 152 |
| 19L | CTAtagaaactcgtagagtccca | 153 |
| 20L | GTAtagaaactcgtagagtccca | 154 |
| 21L | TAAtagaaactcgtagagtccca | 155 |
| 22L | AAAtagaaactcgtagagtccca | 156 |
| 23L | CAAtagaaactcgtagagtccca | 157 |
| 24L | GAAtagaaactcgtagagtccca | 158 |
| 25L | TCAtagaaactcgtagagtccca | 159 |
| 26L | ACAtagaaactcgtagagtccca | 160 |
| 27L | CCAtagaaactcgtagagtccca | 161 |
| 28L | GCAtagaaactcgtagagtccca | 162 |
| 29L | TGAtagaaactcgtagagtccca | 163 |
| 3OL | AGAtagaaactcgtagagtccca | 164 |
| 31L | CGAtagaaactcgtagagtccca | 165 |
| 32L | GGAtagaaactcgtagagtccca | 166 |
| 33L | TTCtagaaactcgtagagtccca | 167 |
| 34L | ATCtagaaactcgtagagtccca | 168 |
| 35L | CTCtagaaactcgtagagtccca | 169 |
| 36L | GTCtagaaactcgtagagtccca | 170 |
| 37L | TACtagaaactcgtagagtccca | 171 |
| 38L | AACtagaaactcgtagagtccca | 172 |
| 39L | CACtagaaactcgtagagtccca | 173 |
| 40L | GACtagaaactcgtagagtccca | 174 |
| 41L | TCCtagaaactcgtagagtccca | 175 |
| 42L | ACCtagaaactcgtagagtccca | 176 |
| 43L | CCCtagaaactcgtagagtccca | 177 |
| 44L | GCCtagaaactcgtagagtccca | 178 |
| 45L | TGCtagaaactcgtagagtccca | 179 |
| 46L | AGCtagaaactcgtagagtccca | 180 |
| 47L | CGCtagaaactcgtagagtccca | 181 |
| 48L | GGCtagaaactcgtagagtccca | 182 |
| 49L | TTGtagaaactcgtagagtccca | 183 |
| 50L | ATGtagaaactcgtagagtccca | 184 |
| 51L | CTGtagaaactcgtagagtccca | 185 |
| 52L | GTGtagaaactcgtagagtccca | 186 |
| 53L | TAGtagaaactcgtagagtccca | 187 |
| 54L | AAGtagaaactcgtagagtccca | 188 |
| 55L | CAGtagaaactcgtagagtccca | 189 |
| 56L | GAGtagaaactcgtagagtccca | 190 |
| 57L | TCGtagaaactcgtagagtccca | 191 |
| 58L | ACGtagaaactcgtagagtccca | 192 |
| 59L | CCGtagaaactcgtagagtccca | 193 |
| 60L | GCGtagaaactcgtagagtccca | 194 |
| 61L | TGGtagaaactcgtagagtccca | 195 |
| 62L | AGGtagaaactcgtagagtccca | 196 |
| 63L | CGGtagaaactcgtagagtccca | 197 |
| 64L | GGGtagaaactcgtagagtccca | 198 |

[0712] Construction of Target Plasmid for Gap Analysis

[0713] To create target plasmids with different gaps an artificial PCR template can be produced adding or removing nucleotides in the gap between the sgRNA binding sites (shown below), this template also amplified by the primers 3042 and 3240, as denoted by SEQ ID Nos 69 and 70, respectively. The templates shown below are for NNG PAM but will be modified by the PCR primer combination chosen. The inserts are thus variable according to the desired PAM sequence encoded by the primers on both ends and the desired gap. PCR should yield products of varying lengths; template N14 results in a gap of 14 bp and an insert length 60. Similarly, N15, N16, N17, N25, N26 and N27, respectively have gaps of 15, 16, 17, 25, 26 or 27 bp and an insert size of 61, 62, 63, 71, 72 or 73 bp.

[0714] Spacer gap region is bold.

N14:
ctctagaaactcgtagagtcccatgtctgcggcttccagagcctgcactcctccaccttg, as
denoted by SEQ ID NO. 199,
N15:
ctctagaaactcgtagagtcccatgtctgccggcttccagagcctgcactcctccaccttg, as
denoted by SEQ ID NO. 200,
N16:
ctctagaaactcgtagagtcccatgtctgcacggcttccagagcctgcactcctccaccttg, as
denoted by SEQ ID NO. 201,
N17:
ctctagaaactcgtagagtcccatgtctgcaccggcttccagagcctgcactcctccaccttg, as
denoted by SEQ ID NO. 202,
N25:
ctctagaaactcgtagagtcccatgtctgccactgcagtgaggcttccagagcctgcactcctccaccttg,
as denoted by SEQ ID NO. 203,
N26:
ctctagaaactcgtagagtcccatgtctgccactgtcagtgaggcttccagagcctgcactcctccaccttg,
as denoted by SEQ ID NO. 204,
N27:
ctctagaaactcgtagagtcccatgtctgccactgtacagtgaggcttccagagcctgcactcctccaccttg,
as denoted by SEQ ID NO. 205.

[0715] These short target sequences are synthesized and cloned into pGEM-T easy cloning system.

[0716] Use of different RNA-guided nucleases and optimization of their protein sequence

[0717] To test the proteins of Example 1 and Example 2 the inventors designed assays for detection of RNA-guided nuclease activity as described, using a library of different in-vitro expressed proteins and a subset of gRNAs on a constant target plasmid will allow rapid scanning of properties of the proteins such as use of different PAM replacement domains, amino-acid substitutions, and different linkers. Following results in-vitro, in-vivo experiments can then confirm these results. It should be noted that representative population of cells treated under the conditions of the current example were taken for analysis using a method for off-target detection cited in the methods section. Due to use of dual RNA targeting, less off-target cleavage compared to Cas9 is expected.

### Example 7

### The Gene Editing System of the Invention for Use in Gene Therapy of Congenital Disorders

[0718] To further evaluate the feasibility of using the gene editing systems of the invention for gene therapy, several genes involved in congenital disorders are next examined

[0719] The gene editing systems of the invention for treating Autosomal dominant Retinitis Pigmentosa (adRP) Retinitis pigmentosa (RP) is an inherited dystrophic or degenerative disease of the retina with a prevalence of roughly one in 4,000.

[0720] There are currently twenty five genes reported to be involved in adRP. Mutations in the RHO gene (Rhodopsin) account for 30% of adRP, and almost all the mutations are missense mutations that lead to replacement of an amino acid reside with another. A specific mutation of Pro23His seems to be the most prevalent (13% of all adRP).

[0721] The inventors therefore next adapt the gene editing systems of the invention for knocking out the mutant allele of the RHO gene and/or replacing a mutated RHO gene in cells of patients suffering from adRP, with a wild type rhodopsin gene.

[0722] AAV is used as a vector and is constructed to comprise a cassette comprising a Donor DNA encoding the a part of Homo sapiens rhodopsin (RHO), whose whole mRNA is of 2.77 kb size (NM_000539, SEQ ID NO. 254, that encodes the amino acid sequence as denoted by SEQ ID NO. 255), as well as the nuclease of the gene editing system of the invention. Alternatively, the donor DNA and nuclease and gRNA may be delivered on separate AAV vectors or together or separately by other means of delivery (i.e. synthetically synthesized modified gRNAs, components encoded by nucleic acids or delivered as RNPs). Potentially a repair-donor-DNA for homologous recombination (HDR) can be significantly shorter allowing both repair-donor and the gene editing system of the invention expressing cassette to be co-delivered. Expression of site-specific nucleases such as the gene editing system of the invention should greatly enhance HDR. Stem/progenitor cell approaches exhibit enormous potential for RP treatment using strategies mainly aimed at the rescue and replacement of photoreceptors and RPE (retinal pigmented epithelium). The sources of stem/progenitor cells are classified into two broad categories: (a) Ocular-derived progenitor cells, such as retinal progenitor cells (RPCs), as well as (b) non-ocular-derived stem cells, including embryonic stem cells (ESCs), induced pluripotent stem cells (iPSCs), and mesenchymal stromal cells (MSCs).

[0723] Challenges still remaining are related to the proliferation and/or differentiation of the stem cells into target cells in vitro. Additional factors to consider are limited likelihood of long-term graft survival and host functional restoration in vivo.

[0724] The inventors use a genetic mouse/rat model of the P23H (proline to histidine) mutation. A mini-pig model of this mutation is also available. The pig eye is similar to the human eye in physiology, anatomy and metabolism.

[0725] Preclinical outcome measurements:

[0726] 1. Full field ERG (Electroretinography).

[0727] 2. Rodent behavioral analysis — Morris water maze, optokinetic

[0728] 3. SD-OCT-OCT is an interferometer-based imaging technology providing cross-sectional images of tissues transparent to infrared illumination.

[0729] 4. Digital imaging

[0730] As indicated above, the gene editing system of the invention is very well suited for gene therapy of adRP.

[0731] The main delivery method for RP is AAV which has a size limit of 4.7 kb. Thus, dScCas9-FokI optimized for small size by deletions described in Example 3 is used. Having dual guide RNAs confers high specificity of the gene editing system of the invention, potentially abolishing off-target mutations of competing genome editing methods. A major challenge is being able to differentiate single nucleotide mutations in the patient's DNA. This may possibly be addressed in two methods, each with its advantages.

[0732] 1) Targeting only the mutant allele (i.e. Pro23His mutation in the Rhodopsin gene) to knock it out by using Locked Nucleic Acid (LNA) or similar RNA modifications in the SCNA which may be designed to be effective in such differentiation, are highly stable, and are suitable for systemic use (Di Martino MT, Gulla A, Gallo Cantafio ME, Altomare E, Amodio N, Leone E, et al. (2014) In Vitro and In Vivo Activity of a Novel Locked Nucleic Acid (LNA)-Inhibitor-miR-221 against Multiple Myeloma Cells. PLoS ONE 9(2): e89659). Thus, knockout of the dominant mutant allele will ostensibly leave sufficient WT recessive allele product to alleviate disease progression.

[0733] 2) Targeting both alleles with the gene editing platform of the invention and concomitantly providing a fractional promoterless WT-like Donor (replacement) DNA for Homologous Recombination. Thus, the Pro23His mutation in the Rhodopsin gene can be corrected in the mutant allele without affecting the WT one and without increasing WT Rhodopsin levels which may be toxic in itself.

[0734] Gene/cell-therapy clinical trials for RP have a relatively short follow up period for safety (12-24 months). If safety results look promising, it is worth going into the possibly longer term follow up for efficacy trials.

[0735] FIG. 6 illustrates the target sequence within exon 1 of the RHO gene of SEQ ID NO. 214, targeted by the SCNA of SEQ ID NOs. 215, 216 of set 1, and of SEQ ID NOs. 217 and 218, of set 2. To increase specificity one or more locked nucleic acids (LNAs) may be included at one or more sites, possibly including base 7 in SEQ ID NO. 216 or base 16 in SEQ ID NO. 217. Gene targeting efficiency in human cells and mouse model may be evaluated by DNA purification and NGS. For human cells, primers SEQ ID NO. 304 and SEQ ID NO. 305 are used for PCR, followed by high-throughput DNA sequencing. For human treatments, the gene targeting efficiency may be evaluated through gain of vision or stop of degradation.

[0736] The gene editing systems of the invention for treating Pseudoachondroplasia (PSACH)

[0737] Pseudoachondroplasia (PSACH) is a skeletal dysplasia characterized by disproportionate short stature, small hands and feet, abnormal joints and early onset osteoarthritis. PSACH is caused by mutations in the gene encoding thrombospondin 5 (TSP-5, also known as cartilage oligomeric matrix protein or COMP), a pentameric extracellular matrix protein primarily expressed in chondrocytes and musculoskeletal tissues.

[0738] PSACH results from a dominant-negative effect of COMP mutations that lead to intracellular retention of mis-assembled pentameric COMP composed of a mix of both mutant and wild-type subunits. Over 100 mutations in COMP have been identified. Approximately 30% of cases result from deletion of one of five sequential aspartic acid residues at position 469-473 and is denoted as the D469del mutation. One mutation in which aspartic acid residue 469 is deleted, D469del, accounts for approximately 30% of PSACH cases.

[0739] Mutant COMP protein is misfolded, which led to a working model of the PSACH disease pathology in which mutations in COMP lead to accumulation of mature COMP in the rER, leading to excessive ER stress and ultimately premature chondrocyte death.

[0740] Currently there are no investigational therapies for pseudoachondroplasia, and therefore there is a clear unmet need for effective therapeutic systems applicable for this disease.

[0741] The inventors therefore evaluate the applicability of the gene editing systems of the invention for treating PSACH. The following preclinical model of Transgenic D469del-COMP mice with type II collagen/tetracycline-inducible promoter system, is therefore used.

[0742] More specifically, robust expression of the D469del-COMP mutant in a transgenic mouse is achieved using a tetracycline-inducible expression system. A transgenic mouse is generated that contained two expression cassettes; a cassette where the type II collagen promoter drives chondrocyte-specific expression of the rtTA protein (of the Tet-On expression system) and a cassette in which the sequence encoding D469del-COMP mutant is under transcriptional control of activated rtTA protein. High expression levels of mutant COMP occur in chondrocytes only when the rtTA protein is activated by the presence of doxycycline. Doxycycline is administered from conception through postnatal life. This D469del-COMP mouse recapitulates critical cellular and clinical features of PSACH including (1) retention of COMP and other extracellular matrix proteins, (2) the presence of intracellular matrix in the rER cisternae, (3) increased chondrocyte death, (4) limb shortening and (5) postnatal onset of dwarfing phenotype.

[0743] The inventors therefore next provide gene editing systems in accordance with the invention, adapted or the COMP gene, as denoted by SEQ ID NO. 219 (exon 13 of the COMP gene), using the SCNAs of sett as denoted by SEQ ID NO. 220 and 221. As shown in FIG. 7, Exon 13 is targeted. Exon 13 contains the deleted ASP469 residues in patients suffering from then PSACH disease.

[0744] Two weeks after treatment is done, a biopsy (cell sample) is taken from 3 different location from skeletal areas expected to pass treatment. DNA is purified and sent for NGS analysis to determine targeting efficiency.

[0745] The PCR primers for amplification before NGS analysis are SEQ ID NO. 296 and SEQ ID NO. 297. Representative population of cells treated under the conditions of the current example are taken for analysis using a method for off-target detection cited in the methods section. Due to use of dual RNA targeting, less off-target cleavage compared to Cas9 is expected.

### Example 8

[0746] The Gene Editing System of the Invention for Use on Immune Checkpoint Receptor Proteins or Ligand Genes, and Applications Thereof in Cancer Therapy

[0747] Targeting PD-1 and PDL-1

[0748] Use of monoclonal antibodies (MoAbs) targeting PD-1 or PDL-1 have been approved for many cancer indications. Programmed cell death protein 1 (PD-1) is expressed on the immune cell, while its ligand, PDL-1 may be expressed on the tumor cell. Thus, in an ex-vivo cell therapy approach (either of autologous or allogeneic origin), T-cells are collected either from a patient or from at least one compatible donor, and gene-edited to knockout PD-1. In some applications, the knockout of PD-1, may be combined with chimeric antigen receptor (CAR) insertion into the PD-1 cut site, and re-infused to the patient. These cells proliferate in the patient's bone marrow and attack the tumor cells.

[0749] The inventors first establish a system for treating non-small cell lung cancer (NSCLC). To ensure the usefulness of the CARs in the animal models expression of the cancer, specific antigens, recognized by the CARs, are examined This is done on the variety of NSCLC cell-lines and significant expression of the antigens is a first filter for selecting the working cell-lines. For the genetic mouse model, spontaneously developing tumors are extracted and examined for the expression of the antigens. Pre-clinical and clinical studies of CAR-T activity in NSCLC involve targeting cancer specific antigen NY-ESO-1/LAGE-1 (Robbins et al, 2011, J Clin Oncol, 29:917-24; Zhao et al, 2005, J Immunol, 174:4415-23; Purbhoo et al, 2006, J Immunol, 176:7308).

[0750] Mouse models for NSCLC involve both genetically modified mice that develop lung cancer and xenografts of human cancer cell-lines. The main limitations in the choice of model are: 1) the tumors must express the specific antigen targeted by the CAR, and 2) the T-cells used must match the model.

[0751] For the genetically modified mouse model the CCSP-rtTA TetO-KrasG12D is used on the background of TRP53-/-& Ink4A-/-. In this model, the specific mutated Kras gene is activated by doxycyclin giving rise to tumors within 1 month (Fisher et al, 2001, Genes Dev, 15:3249-62). In a preliminary study, the tumors from 5 of these mice are examined for the expression of the cancer-specific antigens for which CARs are available. In addition, as the CARs are developed against human proteins, it is ensured that they also recognize the mouse counterparts.

[0752] A variety of human NSCLC tumor cell-lines exist for use in xenograft mouse models (i.e. H1299, A549). Several of these cell-lines are obtained and confirmed for the expression of the tumor antigens targeted by the CARs. Three cell-lines expressing the tumor antigens are examined for their ability to produce tumors in immune deficient mice. Two are selected for the pre-clinical study.

[0753] In all studies, modified T-cells are compared with non-modified T-cell controls (Kalaitsidou et al, 2015, Immunotherapy, 7:487-97). Mice are either induced to produce tumors (genetically modified model) or injected subcutaneously in the flanks with the human cell-lines. Once tumors appear at a volume of ˜200mm³, the mice are injected with the modified or non-modified CAR-T cells. Mouse T-cells are used for the genetically modified model and human T-cells for the xenograft studies. Briefly, the experimental design involves 3 different CAR-T cell titers with at least 5 mice per experimental group. An additional control group involves modified and non-modified T-cells lacking the relevant CAR and a non receiving T-cell group (tumor only). The establishment of the mouse models at the CRO entails the following:

[0754] a. for the genetic mouse model, the time frame, tumors size and spread and statistical variance are examined following the induction of tumorigenesis;

[0755] b. for the xenograft studies, four selected cell-lines are examined for their ability to produce tumors in immune-compromised mice. Two cell-lines presenting the best characteristics in robust and timely tumor generation are chosen. The process also determines the time-frame, measurable variables, and statistical variance to derive the needed experimental group size;

[0756] c. the general reactivity of the mice in the two models to injection of the experimental PD null CAR-T cells is examined in non-tumor bearing mice.

[0757] The genetic mouse model is performed by introducing the PD-1-null CAR-T cells into the mice after the tumors reach a predetermined size (as determined by the previous step). Several doses of the experimental mouse T cells are used. Controls include PD-1-null T cells that do not express any CAR and cells expressing non-specific CARs.

[0758] The xenograft models are performed by engrafting the selected cells under the skin of immune deficient mice. After the tumors reach a predetermined size, several doses of the experimental human T cells are introduced. Controls are similar to the other model. Efficacy is determined by reduction of tumor volume, weight, survival of the mice, and immunohistopathological examination of extracted tumor. In this histo-examination the structure of the tumor, the number and characteristics of the infiltrating cells are tested as compared to the various controls. Robust statistical analysis may be employed to validate the data.

[0759] SCNA and HDR Design

[0760] Knockout of PD-1 is carried out by deletion of the first exon of the PDCD-1 gene and replacement by a CAR-T targeting NY-ESO-1/LAGE-1.

[0761] The chimeric antigen receptor cassette consists of: a constitutive human promoter, a fusion gene of an anti-NY-ESO-1/LAGE-1 scFv, IgG4 scaffold domain, human CD8 transmembrane domain, human CD28 signaling domain, and a human CD3zeta signaling domain as has been described for lentiviral vectors (Maus et al., 2016, Molecular Therapy-Oncolytics, 3:1-9). HDR is facilitated by 500 bp homology arms to the PDCD-1 exon 1. The DNA sequence is shown in SEQ ID NO. 293 and a sequence map is shown in FIG. 13.

[0762] The anti-NY-ESO-1 scFv is derived from a high-affinity antibody with 2nM affinity to NY-ESO-1 (Stewart-Jones et al., 2009, PNAS, 106:5784-8). scFv was constructed by fusing the variable regions of the light and heavy chains with a long glycine-rich linker. CMV promoter and BGH Terminator are used.

[0763] Two possible sites for dScCas9-FokI in the first exon of the PDCD1 gene, are denoted by SEQ ID NO. 222, using the SCNAs of sett as denoted by SEQ ID NO. 223 and 224, or using the SCNAs of set2 as denoted by SEQ ID NO. 225 and 226, also shown in FIG. 8. PD-1 gene NHEJ erroneous repair was tested in Hek293 cells, harvested 96 hours after transfection with plasmids encoding the protein and the SCNAs. ddPCR probe PDF4-TGEE40 (SEQ ID NO. 423) and primers PD F6 (SEQ ID NO. 424) and PD R4 (SEQ ID NO. 425). These results show the ability of dScCasFok to edit the PD-1 exon at high efficiency.

TABLE 16
Gene editing efficiencies of dScCasFok targeting the PD-1 exon 1.

| | Construct | Guide RNA | Editing % | Editing % |
|---|---|---|---|---|
| Description | (SEQ ID NO) | (SEQ ID NO) | (ddPCR76) | (ddPCR79) |
| SpCas9, | 7665 (257) | 14106 (411) | 11.1% | 10.8% |
| SV40 + nucleoplasmin NLS | | | | |
| dScCasFok, SV40 NLS | 11241 (2) | 14078 (412) | 0.8% | 1.4% |
| dScCasFok, SV40 NLS | 11241 (2) | 14080 (413) | 1.8% | 4.0% |
| dScCasFok, SV40 NLS | 11241 (2) | 14082 (408) | 29.5% | 29.0% |
| dScCasFok, SV40 NLS | 11241 (2) | 14084 (409) | 0.7% | 1.4% |
| dScCasFok, SV40 NLS | 11241 (2) | 14086 (410) | 0.4% | 0.7% |
| dScCasFok, SV40 NLS | 11241 (2) | 14088 (414) | 1.1% | 1.2% |
| dScCasFok, SV40 NLS | 11241 (2) | 14090 (415) | 5.6% | 0.7% |

Editing efficiency was quantified by ddPCR (ddPCR#76 and #79 results are shown). NLS = Nuclear localization sequence.

### Example 9

### dCasF-Fok Variants

[0764] a) for PD-1 knock-out

[0765] CasF is a family of Cas proteins found in the Biggiephage Glade, which are huge bacteriophages (Pausch et al (2020), Science, 369:333-7). Pausch et al investigated three CasF variants, CasF-1 (SEQ ID NO: 358), CasF-2 (SEQ ID NO: 359), and CasF-3 (SEQ ID NO: 360). These Cas proteins appear to use a single RuvC domain for both pre-crRNA processing and cleavage of both strands of DNA (Cas9, for comparison, uses accessory proteins for pre-crRNA processing, and an HNH domain for cleavage of the non-template strand of DNA). The RuvC nuclease activity may be inactivated with a D394A mutation in CasF-2 and a D371 mutation in CasF-1. CasF are distant homologues of Cas14a and Cas14b.

[0766] The PAM of CasF-1 is 5′-VTTR-3′, the PAM of CasF-2 is 5′-TBN-3′, and the PAM of CasF-3 is 5′-VTTN-3′. CasF-2 is preferable to use in a dCasF-Fok system due to the reduced PAM requirement. dCasF2Fok variants were designed with FokI at either the C-terminus (SEQ ID NO: 363) or N-terminus (SEQ ID NO: 366).

[0767] Several target sites with TBN PAM are possible in Exon 2 of PD-1, both in PAM-out and PAM-in configurations. The dual guide RNAs may be expressed using H1 and U6 promoters. Three PAM-out guides (SEQ ID NO: 367, 368, and 369) and three PAM-in guides (SEQ ID NO: 370, 371, 372) were designed.

[0768] b) for MPO gene

[0769] In a further example, dCasF2-Fok (a fusion protein between a nuclease-deficient CasF-2 (dCasF-2, SEQ ID NO: 361) and FokI), may have all or part of its RuvC nuclease domain deleted. The RuvC domain includes dCasF-2 residues 389-410, residues 601-612, and residues 689-706 of SEQ ID NO: 361. RuvC domain residues may be replaced by short linkers (Gly-Gly-Ser-Gly, as denoted by SEQ ID NO: 399). Three deletion variants of dCasF2-Fok were designed: dCasF2-Fok RuvC del 1 which has deletion in dCasF-2 residues 389-410 (SEQ ID NO 362), dCasF2-Fok RuvC del 2 which has deletion in dCasF-2 residues 601-612 (SEQ ID NO 364), and dCasF2-Fok RuvC del 3 which has deletion in dCasF-2 residues 689-706 (SEQ ID NO 365). Variants are tested on the MPO exon 1 using the same ddPCR primers and probe as for dScCas9-Fok and variants thereof. The plasmid for expression of MPO exon 1 guides (in PAM-out configuration) is shown in SEQ ID NO 319.

### Example 10

### dCas-FokI Variants with Optimized Linker Sequences

[0770] The dCas9-FokI used herein are subjected to optimization using different linker sequences. The “linker peptide” connecting the “Linking domain” attached to the guide RNA and the “Nuclease domain” that cleaves the DNA may be changed to alter its properties. These changes may include length and amino acid composition (including amino acid charge, size, hydrophobicity, secondary structure affinity).

[0771] The following examples of linkers of SEQ ID NOs. 206, 207, 208 and 209 that link dCasX to FokI in the chimeras of SEQ ID NOs. 210, 211, 212 and 213, respectively, are shown to illustrate possible changes to the linker peptide. The efficiency of the different chimeras linked by each of the linking domain is evaluated.

### Example 11

### Targeting CTLA-4

[0772] Use of MoAbs against immune checkpoint receptor proteins or ligands has shown greater toxicity when targeting cytotoxic T-lymphocyte-associated protein 4 (CTLA-4) presumably as it is a general systemic immune system checkpoint, whereas PD-1/PDL-1 seems to be more local/tumor specific. As designed here, ex-vivo modified CTLA-4 knockout lymphocytes would not only generate less autoimmune toxicity than MoAbs, as only a portion would contain the knockouts, but could be combined with a PD-1 antibody as well as with any additional cancer therapy. While the combination of both antibodies (anti PD1 and anti CTLA-4) has been approved only in melanoma, there is promising early data in NSCLC. The third indication would be advanced renal cell cancer, where the combination of PD-1 and CTLA-4 inhibition (by MoAbs) is an approved indication. Thus, as in melanoma, ex-vivo modified CTLA-4 knockout lymphocytes may generate less autoimmune toxicity than MoAbs, as only a portion of the cells would contain the knockouts, and thus could be combined with a PD-1 antibody.

[0773] The inventors therefore next evaluate the feasibility of using the gene editing system of the invention for targeting CTLA4, in lymphocytes obtained from melanoma, NSCLC or renal cell cancer patients. The dScCas9-FokI system may be used to knock-out exon 1 of human CTLA4 gene. As shown in FIG. 9A, 9B, the human CTLA4 exon 1 as denoted by SEQ ID NO. 227, using the SCNAs of sett as denoted by SEQ ID NO. 228 and 229, or using the SCNAs of set2 as denoted by SEQ ID NOs. 230 and 231. Sequencing primers for NGS are SEQ ID NOs. 298 and 299.

[0774] Gene Knock-Out with Optimized dCasX-FokI System

[0775] Alternatively, dCasX-FokI system may be used to knock-out exon 1 of human CTLA4 gene. As shown in FIG. 12, the human CTLA4 exon 1 and 5′ untranslated sequence as denoted by SEQ ID NO. 285, using the SCNAs as denoted by SEQ ID NO. 286 and 287.

[0776] CasX are a separate class of Cas nucleases to Cas9 nucleases [11]. A major limitation to their function as effective nucleases is their PAM sequence of TTC. Alteration that reduce or remove the PAM sequence would significantly improve their utility.

[0777] Expected results are a naturally smaller protein fused to FokI, whereby CasX's natural PAM binding domain has been altered to allow greater flexibility in target choice. The Non-Target Strand Binding (NTSB) domain [11] is residues 101-191 and is involved in DNA cleavage and thus may be redundant for a FokI fusion. The Target Strand Loading (TSL) is residues 825-934 and is a domain of unknown function. Inventors' analysis suggests it may be dispensable for target site binding. The individual point mutations or their combinations below are expected to change the PAM binding domain to remove specific DNA-base-protein interaction replacing them with non-sequence specific interactions.

[0778] The following chimeric proteins are therefore prepared as described in the Experimental procedures section herein before. Constructs ordered as gene synthesis constructs from GeneArt: dCasX-FokI, as denoted by SEQ ID NO. 45, dCasX-FokI dNTSB, as denoted by SEQ ID NO. 46, dCasX-FokI dTSL, as denoted by SEQ ID NO. 47, dCasX-FokI dNTSB dTSL, as denoted by SEQ ID NO. 48, and variants thereof that comprise at least one substitution in at least one of K226, specifically, substituting lysine to A, K226, specifically, substituting lysine to Q, 5521, specifically, substituting serine to K, 5525, specifically, substituting serine to K and G577, specifically, substituting glycine to K. Gene-editing efficiency is determined by DNA sequencing of transformed lymphocytes. Sequencing primers for NGS are SEQ ID NO. 298 and 299.

### Example 12

[0779] The Gene Editing System of the Invention for Use in Tumor Associated Antigens (TAAs)

[0780] The inventors next establish the feasibility of using the gene editing systems of the invention in targeting TAAs, for cancer therapy.

[0781] Ex-Vivo Cell therapy for treatment of Ovarian and or triple-negative breast cancer by targeting Siglec-10

[0782] Many tumors overexpress CD24. Recently it has been shown (Barkal et al 2019, Nat Rev Cancer, 572:392-6) that CD24 can be the dominant innate immune checkpoint in ovarian cancer and breast cancer, and is a promising target for cancer immunotherapy. Expression of this surface protein is produced as a “self” anti-offensive or suppressive signal, which is involved in macrophage evasion of the cancer cell through its interaction with the inhibitory receptor sialic-acid-binding Ig-like lectin 10 (Siglec-10), which is expressed by tumor-associated macrophages. Genetic ablation and therapeutic blockade of either CD24 or Siglec-10, as well as blockade of the CD24-Siglec-10 interaction using monoclonal antibodies resulted in a macrophage-dependent reduction of tumor growth in vivo and an increase in survival time. Siglec-10 is expressed in cells of the innate immune system and cells transcribing and expressing Siglec-10 RNA and protein respectively can mainly be found in spleen, tonsil, lymph node, bone marrow and the appendix (human protein atlas). SIGLECs are members of the immunoglobulin superfamily that are expressed on the cell surface. Most SIGLECs have one or more cytoplasmic immune receptor tyrosine-based inhibitory motifs, or ITIMs. SIGLECs are typically expressed on cells of the innate immune system, with the exception of the B -cell expressed SIGLEC6.

[0783] Thus, targeting Siglec-10 by knocking it out for example by inducing a frameshift mutation, could be expected to produce Macrophages that are insusceptible to the tumor's CD24 suppressive signal.

[0784] The inventors therefore have designed an ex-vivo method to treat cancer in a human patient by targeting CD14+primary monocytes from the patient's bone-marrow or peripheral blood. Monocytes evolve into Macrophages and dendritic cells. Though protocols for CD34+gene-editing are much further developed, as in this example it was not intended to eliminate Siglec-10 expression from B-cells (which also evolve from CD34+HSCs), and as Siglec-10 is constitutively expressed on B cell surfaces and acts as an inhibitory coreceptor of the BCR it is probably not advisable to use targeted CD34+HSCs in this case. Alternatively, as CD34+cells are progenitors of CD14+ and easier to transfect, it may be preferable to differentiate CD14+ monocytes from this genome-edited precursor after a revival and/or expansion period.

[0785] Monocytes typically only live a few days in culture. In-vivo survival of HSC derived monocytes may also be short, though there are multiple pathways for the generation and maintenance of distinct mononuclear phagocyte subpopulations. For example, Kupffer cells, as well as lung, peritoneal and splenic macrophages are established before birth and remain in adulthood uncoupled from the steady state monocyte pool (Yona S. et al. Immunity, 2013, 38:79-91). Next, the inventors knockout the Siglec-10 gene in the monocytes (or CD34+) using an RNA-guided nuclease, optionally, expanding and selecting cells not expressing Siglec-10 and re-infusing the cells into the patient.

[0786] A protocol for CD14+monocyte genome editing using CRISPR-Cas9 has recently been developed (Wang et al, 2018, Molecular Therapy: Nucleic Acids, 11:P130-41). In this paper they achieved up to 12% cleavage of their target in primary monocytes using plasmid transfection. Here, pre-assembled (ribonucleo-protein) RNPs are used for enhanced efficiency. CRISPR-Cas9 RNPs can achieve more than 90% NHEJ erroneous repair in CD34+ HSCs using electroporation (Wu et al, 2019, Nature Medicine, 25:776-83).

[0787] The use of the gene editing systems of the invention that is a precise, dual sgRNA system, significantly diminish the danger of off-target mutations relatively to single RNA guided CRISPR-Cas9.

[0788] Delivery of the gene-editing reagents is made using nucleic acids encoding the protein and sgRNAs (SCNAs) or by producing the protein and a synthetic RNA, combining them in-vitro and supplying them to the monocyte cells in culture, or by different combination of nucleic acids and proteins. Use of a preassembled ribonucleic-acid — protein has several advantages when no foreign gene needs to be introduced as this enhances the safety as no foreign DNA is present to integrate into genomic breaks.

[0789] As shown by FIG. 10, the inventors next target exon 1 of the human Siglec-10 gene as denoted by SEQ ID NO. 232, using the SCNAs of sett as denoted by SEQ ID NO. 233 and 234, or using the SCNAs of set2 as denoted by SEQ ID NO. 235 and 236, or using the SCNAs of set3 as denoted by SEQ ID NO. 237 and 238, or using the SCNAs of set4 as denoted by SEQ ID NO. 239 and 240, or using the SCNAs of sets as denoted by SEQ ID NO. 241 and 242.

### Example 13

### dCas-Fok Variants with Activity Enhanced by Chromatin Binding Domains

[0790] Chromatin binding domains may enhance the interaction of nucleases with genomic DNA and/or allow greater accessibility into the genomic DNA. HMG (high mobility group proteins) are one such example of chromatin binding domains that may be fused with dCas-Fok variants. An example of this is shown in the Table 17 below where dScCas9Fok is compared to HMGN-dScCas9Fok, which is a fusion protein between the HMGN box chromatin opening domain (SEQ ID NO:324) and dScCas9Fok. SCNAs targeting the human MPO gene exon 1 were encoded by plasmid GeneMsgRNA15E1. MPO gene NHEJ erroneous repair was tested in HEK293 cells, harvested 72 hours after transfection with plasmids encoding the proteins and the SCNAs.

TABLE 17
Gene editing efficiencies of HMGN-dScCasFok construct.

| | Construct | |
|---|---|---|
| | (SEQ ID) | Editing % |
| dScCasFok, 2NLS variant | 13185 (330) | 10.88 |
| HMGN-dScCasFok, 2NLS variant | 13213 (323) | 14.20 |

Editing efficiency was quantified by ddPCR (ddPCR#63 results are shown). NLS = Nuclear localization sequence.

[0791] Addition of a chromatin binding domain, HMGN (SEQ ID NO:324) to the N-terminus of dScCas-Fok caused a 30.5% improvement of NHEJ-ER compared to a control dScCasFok variant with no chromatin binding domains. This shows that fusing dScCas-Fok to a chromatin binding domain may improve activity, possibly through improved chromatin binding or accessibility.

### Example 14

### dCas14-Fok1 and Derivatives

[0792] Alternative dCas variants may be used in the dCasFok system. Cas14 is a class of CRISPR-Cas nucleases that are approximately half the size of Cas9 nucleases. Cas14 has been reported to carry out targeted dsDNA cleavage at sites containing a PAM with 5′ TTTN sequence (Karvelis et al., 2019, Biorxiv, doi:10.1101/654897). Nuclease-deficient Cas14 proteins have been reported. dCas14-FokI is predicted to have significantly higher specificity than Cas14 enzymes due to the presence of two guide RNA sequences. Fusion with protein domains promoting chromatin binding and opening is predicted to increase cleavage efficiency without compromising specificity.

[0793] dCas14-FOKI is shown in SEQ ID NO. 271. dCas14-FOKI fused to chromatin binding StkC domain is shown in SEQ ID NO. 272. dCas14-FokI fused to HIV integrase DNA-binding domain is shown in SEQ ID NO. 273. dCas14-FOKI fused to Sso7d DNA-binding domain is shown in SEQ ID NO. 274. dCas14-FOKI with N-terminal HMGN box chromatin opening domain is shown in SEQ ID NO. 275. dCas14-FOKI with C-terminal HMGB1 chromatin opening domain is shown in SEQ ID NO. 279. dCas14-FOKI with C-terminal HMGB3 chromatin opening domain is shown in SEQ ID NO. 280. dCas14-FOKI with C-terminal HMGB4 chromatin opening domain is shown in SEQ ID NO. 281. dCas14-FOKI with N-terminal HMGN box chromatin opening domain and C-terminal HMGB1 chromatin opening domain is shown in SEQ ID NO. 276. dCas14-FOKI with N-terminal HMGN box chromatin opening domain and C-terminal HMGB3 chromatin opening domain is shown in SEQ ID NO. 277. dCas14-FOKI with N-terminal HMGN box chromatin opening domain and C-terminal HMGB4 chromatin opening domain is shown in SEQ ID NO. 278.

[0794] The dCas14-FokI system may be used to knock-out Siglec-10. SCNAs targeting exon 2 of Siglec 10 are SEQ ID NO. 282 and SEQ ID NO. 283. All constructs ordered as gene synthesis constructs from various suppliers. Treatment efficiency is detected by Cy5 labeled antibodies against each of the targeted immune checkpoint receptor proteins or ligands using FACS analysis. A Cy5 labeled secondary antibody (Goat Anti-Mouse IgM μ chain Antibody, Cy5 conjugate AP500S Merck) is used for ELISA or FACS analysis. Next-generation sequencing is also used to evaluate gene-editing efficiency, NGS primers that may be used for the dCas14-Fok system include SEQ ID NO. 300 and 301.

### Example 15

### The Gene Editing System of the Invention for Use in Receptors for Viral Antigens

[0795] Targeting genes encoding avr33 integrin in cows to form Foot and Mouth Disease resistance. Similar to CCR5 and HIV in human, the epithelial Integrin avr36 is a receptor for the foot-and-mouth disease virus. Therefore, knock-out of genes encoding subunits of the avr33 integrin may reduce susceptibility to foot-and-mouth disease. Since the alpha subunit may interact with many beta subunits, the ITGB3 gene encoding specifically the beta subunit of avr33 integrin was selected. FIG. 11 illustrates the targeted exon 1. The following SCNAs sets were designed to knockout exon 1 of the ITGB3 gene, as denoted by SEQ ID NO. 243, using the SCNAs of sett as denoted by SEQ ID NO. 244 and 245, or using the SCNAs of set2 as denoted by SEQ ID NO. 246 and 247, or using the SCNAs of set3 as denoted by SEQ ID NO. 248 and 249, or using the SCNAs of set4 as denoted by SEQ ID NO. 250 and 251, or using the SCNAs of sets as denoted by SEQ ID NO. 252 and 253.

[0796] A microinjection of the RNPs of the invention are performed to calf oocytes. More stable and active ancestral dCas9-FokI RNPs may be used for this purpose, described below. Gene-editing efficiency may be evaluated by PCR, using primers SEQ ID NO. 302 and SEQ ID NO. 303.

### Example 16

### Highly Stable and Active Ancestral dCas9-FokI Nucleases

[0797] Ancestral reconstruction is a method of inferring the ancestors of a protein of interest by comparing related proteins and using statistical methods to rewind their evolutionary history. Ancestral proteins often have increased stability, expression, and activity (Trudeau et al, 2016, Mol Biol Evol, 33:2633-41). For that reason they have been proposed as ideal starting points for further optimization (Trudeau & Tawfik, 2019, Curr Opin Biotechnol, 60:46-52). In the context of genome editing proteins, they may assist with expression and in vivo activity.

[0798] A multiple sequence alignment of 200 homologues of Cas9 with 25-90% identity was created by the inventors from the UniRef90 database (Suzek et al. 2015, Bioinformatics, 31:926-32). Maximum likelihood statistical methods were applied to infer the ancestors of these proteins (Ashkenazy et al., 2012, Nucleic Acids Research, 40:W580-4). An ancestral Cas9 is shown in SEQ ID NO. 268. A nuclease deficient Ancestral Cas9 fused to FokI nuclease is shown in SEQ ID NO. 284. Constructs ordered as gene synthesis constructs from GeneArt.

[0799] A multiple sequence alignment of 67 homologues of FokI with 25-90% identity was created by the inventors from the UniRef90 database (Suzek et al. 2015, Bioinformatics, 31:926-32). Analysis of the resulting sequence alignment was used to find consensus positions (where over 50% of the amino acids at a particular site in the alignment are the same residue and differ from that of wild-type FokI (Trudeau et al, 2016, Mol Biol Evol, 33:2633-41)). This consensus FokI (“FokI consensus”, also referred to as “ancestral FokI”) is shown in SEQ ID NO. 439. This variant also included two activity-enhancing mutations present in the “Sharkey” FokI mutant (Guo et al, 2010, J Mol Biol, 400(1):96-107), which were also tested independently in a separate FokI mutant (“enhanced FokI”, also dented by SEQ ID NO. 486). These FokI variants were used to construct several dCasFok variants with and without Cas9 ancestral mutations, specifically in the RuvC and REC1/2 domains comprising residues 1-738 of the Cas9 component of dCasFok (residues 227-965 of SEQ ID NO:2). Constructs were ordered as gene synthesis constructs from GeneArt.

[0800] As shown in Table 18 and in FIG. 14, ddPCR was used to evaluate gene editing activity of constructs containing ancestral mutations, at time points of 76 h and 120 h. Ancestral mutations in the RuvC and REC1/2 domains of the Cas9 component of dCasFok led to a moderate improvement in gene editing activity in the 120 h time point, from 20-24% (SEQ ID NO: 375) to 28% (SEQ ID NO:441), although these improvements were not present in the 76 h time point. When Fold consensus and activity-enhancing mutations were added to dCasFok, gene editing activity was increased in the 120 h time point to a maximum of 35% (SEQ ID NO: 444), and in the 76 h time point to a maximum of 38% in a construct with a C-terminal His tag construct (SEQ ID NO:445). When FokI consensus mutations were added to the HNH deletion variant (EXAMPLE 3), gene editing activity was increased to 12% at 120 h and 18.6% at 76 h (SEQ ID NO:448). These results demonstrate improvements to overall gene editing activity using ancestral/consensus mutations, as well as previously described activity-enhancing mutations. These results also show that gene editing efficiency may vary based on editing times (120 h vs 76 h), which may have different effects on different variants, potentially due to differences in stability, activity, or expression.

TABLE 18
Gene editing efficiencies of ancestral dCasFok variants.

| | SEQ ID | TG | editing %, | Editing %, |
|---|---|---|---|---|
| Description | NO | number | 120 h | 76 h |
| Control | | | | |
| Cas9 | 257 | 7665 | 50.38% | 41.98% |
| Cas9 | 257 | 7665 | 44.99% | 23.21% |
| dScCasFok, SV40 NLS | 2 | 11241 | 11.49% | 17.85% |
| dScCasFok, SV40 NLS | 2 | 11241 | 14.39% | 19.89% |
| dScCasFok, SV40 NLS | 2 | 11241 | 13.64% | 20.03% |
| dScCasFok, SV40 + SV40 bipartite NLS | 375 | 14280 | 19.66% | 27.41% |
| dScCasFok, SV40 + SV40 bipartite NLS | 375 | 14280 | 23.89% | 33.67% |
| dScCasFok, SV40 + SV40 bipartite NLS | 375 | 14280 | 23.59% | 32.73% |
| Ancestral Mutations in RuvC + Rec1/2 domains | | | | |
| dCasFok, SV40 + bipartiteSV40, ancestral mutations | 440 | 14607 | 0.27% | 0.27% |
| in RuvC + REC1/2 domains | | | | |
| dCasFok, SV40 + bipartiteSV40, ancestral mutations | 441 | 14608 | 28.08% | 22.14% |
| in RuvC + REC1/2 domains, 6His tag | | | | |
| dCasFok, SV40 + bipartiteSV40, ancestral mutations | 442 | 14609 | 6.46% | 6.90% |
| in RuvC + REC1/2 domains, HNH deletion | | | | |
| dCasFok, SV40 + bipartiteSV40, ancestral mutations | 443 | 14610 | 4.96% | 6.45% |
| in RuvC + REC1/2 domains, HNH deletion, 6His tag | | | | |
| Enhanced FokI | | | | |
| dCasFok, FokI enhanced, SV40 + bipartiteSV40 | 487 | TG14657 | 27.37% | 19.45% |
| dCasFok, FokI enhanced, SV40 + bipartiteSV40, | 488 | TG14658 | 25.72% | 23.30% |
| 6His tag | | | | |
| dCasFok, FokI enhanced, SV40 + bipartiteSV40, | 489 | TG14661 | 33.55% | 29.31% |
| ancestral mutations in RuvC + REC1/2 domains | | | | |
| dCasFok, FokI enhanced, SV40 + bipartiteSV40, | 490 | TG14662 | 24.46% | 17.75% |
| ancestral mutations in RuvC + REC1/2 domains, | | | | |
| 6His tag | | | | |
| dCasFok, FokI enhanced, SV40 + bipartiteSV40, | 491 | TG14665 | 10.24% | 10.39% |
| ancestral mutations in RuvC + REC1/2 domains, | | | | |
| HNH deletion longer linker | | | | |
| dCasFok, FokI enhanced SV40 + bipartiteSV40, | 492 | TG14666 | 0.04% | 0.29% |
| ancestral mutations in RuvC + REC1/2 domains, | | | | |
| HNH deletion longer linker, 6His tag | | | | |
| Consensus FokI | | | | |
| dCasFok, FokI consensus, SV40 + bipartiteSV40 | 444 | 14659 | 35.16% | 24.85% |
| dCasFok, FokI consensus, SV40 + bipartiteSV40, | 445 | 14660 | 29.22% | 38.11% |
| 6His tag | | | | |
| dCasFok, FokI consensus, SV40 + bipartiteSV40, | 446 | 14663 | 31.48% | 25.77% |
| ancestral mutations in RuvC + REC1/2 domains | | | | |
| dCasFok, FokI consensus, SV40 + bipartiteSV40, | 447 | 14664 | 33.05% | 21.95% |
| ancestral mutations in RuvC + REC1/2 domains, | | | | |
| 6His tag | | | | |
| dCasFok, FokI consensus, SV40 + bipartiteSV40, | 448 | 14667 | 12.10% | 18.60% |
| ancestral mutations in RuvC + REC1/2 domains, | | | | |
| HNH deletion longer linker | | | | |
| dCasFok, FokI consensus SV40 + bipartiteSV40, | 449 | 14668 | 6.85% | 8.12% |
| ancestral mutations in RuvC + REC1/2 domains, | | | | |
| HNH deletion longer linker, 6His tag | | | | |

Editing efficiency was quantified by ddPCR (ddPCR#86 results are shown for 120 h and 76 h of editing). NLS = Nuclear localization sequence.

### Example 17

### Gene-Editing with Alternative Nucleases

[0801] Nuclease domains play an important role in gene editing efficiency: catalytic rate can influence activity and specificity (Miller et al., 2019, Nature Biotechnology 37:945-52), and cellular stability can influence activity in vivo.

[0802] Type IIs restriction endonucleases contain both a recognition domain that binds to a DNA target sequence, and a cleavage domain that cuts at or near the target site. This cleavage might be dimerization-dependent, and require the association of the cleavage domain of two monomeric restriction endonucleases. Flavobacterium okeanokoites Type IIS restriction endonuclease FokI is known to require cleavage domain dimerization for DNA cleavage (Bitinaite et al, 1998, PNAS, 95:10570-5).

[0803] Alternative Type IIS nuclease cleavage domains for use in a dCas9-Fok system, instead of FokI, may be obtained from experimentally characterized Type IIS restriction enzymes (Roberts et al., 2015, Nucleic Acid Research, 43:D298-9). These may include cleavage domains from Type IIS restriction endonucleases: AarI, Acc36I, AceIII, AclWI, AcuI, AjuI, Alol, AlwI, Alw261, AmaCSI, ApyPI, AquII, AquIII, AquIV, ArsI, AsuHPI, BaeI, BarI, Bbr7I, BbsI, BbvI, BbvII, Bbv16II, BccI, BccI, Bce83I, BceAI, BceSIII, BceSIV, BcefI, BcgI, BciVI, Bco5I, Bcol 16I, BcoDI, BcoKI, BfiI, BfuI, BfuAI, BinI, Bli736I, Bme585I, BmrI, BmsI, BmuI, BpiI, BpmI, BpuAI, BpuEI, BpuSI, BsaI, BsaXI, BsbI, Bsc91I, BscAI, BseKI, BseMI, BseMII, BseRI, BseXI, BseZI, BsgI, BslFI, BsmAI, BsmBI, BsmFI, Bso31I, BsoMAI, Bsp423I, BspCNI, BspD6I, BspIS4I, BspKT5I, BspLU11III, BspQI, BspST5I, BspTNI, BspTS514I, Bst6I, Bst12I, Bst19I, Bst71I, BstBS32I, BstFZ438I, BstGZ53I, BstH9I, BstMAI, BstOZ616I, Bst31TI, BstTS5I, BstV1I, BstV2I, BsuI, Bsu6I, Bsu537I, BtgZI, BtsI, BtsIMutI, BtsCI, Bvel, Bve1B23I, CatHI, CchII, CchIII, Cco14983III, CdpI, CjeI, CjeF38011III, CjeIAIII, CjeNII, CjeNIII, CjePI, CjeP659IV, CjeYH002IV, CjuII, CseI, CspCI, CstMI, DraRI, DrdIV, EacI, Eam1104I, EarI, EciI, Eco31I, Eco57I, FaqI, FauI, Fph2801I, GeoICI, GsuI, HgaI, Hin4I, Hin4II, HphI, Hpy99XXII, HpyAV, HpyC1I, Ksp632I, LguI, Lsp1109I, LweI, MaqI, MboII, Mcr10I, MlyI, MmeI, MnlI, NcuI, NgoAVII, NgoAVIII, NlaCI, NmeAIII, NmeA6CIII, PciSI, PcoI, PhaI, PlaDI, PleI, PpiI, PpsI, PspOMII, PspPRI, PsrI, RceI, RdeGBII, RlaII, RleAI, RpaI, RpaBI, RpaB5I, Rtr1953I, SapI, SchI, SdeAI, SdeOSI, SfaNI, SmuI, SspD5I, SstE37I, Sth132I, StsI, TaqII, TaqIII, TsoI, TspDTI, TspGWI, TstI, Tth111II, TthHB27I, UbaF9I, UbaF11I, UbaF12I, UbaF13I, UbaF14I, Vga43942II, VpaK32I, WviI.

[0804] Alternatives to dScCas9-FokI include dScCas9-CspCI (SEQ ID NO. 288), dScCas9-BsgI (SEQ ID NO. 289), and dScCas9-BbvI (SEQ ID NO. 290). Constructs are ordered as gene synthesis constructs from GeneArt.

The application's sequence listing, which the Patent Office published only in electronic form, follows.

SEQUENCE LISTING (506 sequences)

SEQ ID NO: 1 - DNA, 8648 bp, Artificial Sequence
  Construct 10916 dScCas9-FokI EMX1sgRNA27T1-NNG
  misc_feature: synthetic
ctaaattgtaagcgttaatattttgttaaaattcgcgttaaatttttgttaaatcagctcattttttaaccaataggccgaaatcggcaaaatcccttataaatcaaaagaatagaccgagatagggttgagtggccgctacagggcgctcccattcgccattcaggctgcgcaactgttgggaagggcgtttcggtgcgggcctcttcgctattacgccagctggcgaaagggggatgtgctgcaaggcgattaagttgggtaacgccagggttttcccagtcacgacgttgtaaaacgacggccagtgagcgcgacgtaatacgactcactatagggcgaattgaaggaaggccgtcaaggccgcatatagtaatcaattacggggtcattagttcatagcccatatatggagttccgcgttacataacttacggtaaatggcccgcctggctgaccgcccaacgacccccgcccattgacgtcaataatgacgtatgttcccatagtaacgccaatagggactttccattgacgtcaatgggtggagtatttacggtaaactgcccacttggcagtacatcaagtgtatcatatgccaagtacgccccctattgacgtcaatgacggtaaatggcccgcctggcattatgcccagtacatgaccttatgggactttcctacttggcagtacatctacgtattagtcatcgctattaccatggtgatgcggttttggcagtacatcaatgggcgtggatagcggtttgactcacggggatttccaagtctccaccccattgacgtcaatgggagtttgttttggcaccaaaatcaacgggactttccaaaatgtcgtaacaactccgccccattgacgcaaatgggcggtaggcgtgtacggtgggaggtctatataagcagagctggtttagtgaaccgtcagatccgctagcgctaccggtatggcccctaagaagaagagaaaagtcggcggctctggcagccagctggtcaagtctgagctggaagagaagaaaagcgagctgcggcacaagctgaaatacgtgccccacgagtacatcgagctgatcgagatcgccagaaacagcacccaggacagaatcctggaaatgaaggtcatggaattctttatgaaggtgtacggctaccggggcaagcacctcggaggatctagaaagcctgacggcgccatctataccgtgggcagccctatcgattacggcgtgatcgtggataccaaggcctacagcggcggctacaatctgcctattggacaggccgacgagatgcagagatacgtggaagaaaaccagacacggaacaagcacatcaaccccaacgagtggtggaaagtgtaccccagcagcgtgaccgagttcaagttcctgttcgtgtccggccacttcaagggcaactacaaggcccagctgacccggctgaaccacatcacaaattgcaacggcgctgtgctgtctgtggaagaactgctgatcggcggcgagatgatcaaggccggaacactgacactggaagaagtgcggcggaagttcaacaacggcgagatcaacttcagcggcagcgagacacctggcacatctgaatctgccacacctgagagcatggaaaagaagtacagcatcggcctggccatcggcacaaattctgttggctgggccgtgatcaccgacgactacaaggtgcccagcaagaaattcaaggtgctgggcaacaccaaccggaagtccatcaagaaaaacctgatgggcgccctgctgttcgattctggcgaaacagccgaggccaccagactgaagagaaccgccagaagaagatacacccggcggaagaaccggatcagatacctgcaagagatcttcgccaacgagatggccaagctggacgacagcttctttcagagactggaagagtccttcctggtggaagaggacaagaagaacgagcggcaccccatcttcggcaatctggctgatgaggtggcctaccacagaaactaccccaccatctaccacctgaggaagaagctggccgactctcctgagaaggccgacctgagactgatctatctggccctggctcacatcatcaagttccggggccacttcctgatcgagggcaagctgaatgccgagaacagcgacgtggccaaactgttctaccagctgatccagacctacaaccagctgttcgaggaaagccctctggacgagattgaggtggacgccaagggaatcctgagcgccagactgagcaagagcaagcggctggaaaagctgatcgccgtgtttcccaacgagaagaagaatggcctgttcggcaacatcattgccctggcactgggcctgacacctaacttcaagtccaacttcgacctgaccgaggacgccaaactgcagctgagcaaggacacctacgacgacgatctggatgagctgctgggccagatcggagatcagtacgccgatctgttcagcgccgccaagaatctgtctgacgccatcctgctgagcgacatcctgagatccaacagcgaagtgacaaaggcccctctgagcgcctccatggtcaagagatatgacgagcaccaccaggacctggctctgctgaaaacccttgtgcggcagcagttccccgagaagtatgccgagatcttcaaggacgacaccaagaacggctacgccggctatgttggcatcggcatcaagcacagaaagcggaccaccaagctggccacacaagaggaattctacaagttcatcaagcccatcctcgagaagatggacggcgccgaagaactcctggctaagctgaacagggacgacctgctgcggaagcagagaaccttcgacaatggcagcatccctcaccagatccacctgaaagagctgcacgccattctgcggcggcaagaagagttctacccattcctgaaagaaaaccgggaaaagattgagaagatcctgaccttcaggatcccctactacgtgggaccactggccagaggcaatagcagattcgcttggctgaccagaaagagcgaggaagccatcacaccctggaacttcgaggaagtggtggataagggcgccagcgctcagtccttcatcgagcggatgaccaatttcgacgagcagctgcccaacaagaaggtgctgcctaagcacagcctgctgtacgagtacttcaccgtgtacaatgagctgaccaaagtcaaatacgtgacagagcggatgcggaagcctgagtttctgagcggcgagcagaaaaaggccatcgtggatctgctgttcaagaccaacagaaaagtgaccgtgaagcagctgaaagaggactacttcaagaaaatcgagtgcttcgacagcgtcgagatcatcggcgtggaagatagattcaacgccagcctgggcacataccacgatctgctgaagattatcaaggacaaggacttcctggacaacgaggaaaacgaggacatcctggaagatatcgtgctgaccctgacactgtttgaggacagagagatgatcgaggaacggctgaaaacatacgcccacctgttcgacgacaaagtgatgaagcaactgaagcggcggcactacacaggctggggcagactgtccagaaagatgattaacggcatccgggacaagcagagcggcaagaccatcctggactttctgaagtccgacggcttcagcaaccggaacttcatgcagctgattcacgacgacagcctcaccttcaaagaggaaatcgagaaggcccaggtttccggccagggcgattctctgcacgagcagattgctgatctggccggatctcccgccattaagaagggcatcctgcagacagtgaagatcgtggacgaactcgtgaaagtgatgggccacaagcctgagaacatcgtgatcgaaatggccagagagaaccagaccaccaccaagggcctgcagcagtccagagagagaaagaagcggatcgaagagggcatcaaagagctggaaagccagatcctcaaagagaaccccgtcgagaacacccagctgcagaacgagaagctgtacctgtactacctgcagaatggacgggatatgtacgtggaccaagaactggacatcaaccggctgtccgactacgatgtggatgccatcgtgccccagagcttcatcaaggatgacagcatcgacaacaaggtcctgaccagatccgtggaaaacagaggcaagagcgacaacgtgccctccgaagaggtggtcaagaagatgaagaattactggcgacagctgctgaacgccaagctgatcacccagagaaagttcgacaacctgaccaaggccgagagaggcggactgtctgaagctgataaggccggcttcattaagcggcagctggtggaaacccggcagatcacaaagcacgtggcccggatcctggacagcagaatgaacaccaagcgggacaagaacgacaagcctatccgggaagtgaaagtcatcaccctgaagtccaagctggtgtccgatttccggaaggatttccagctgtacaaagtgcgcgacatcaacaactaccatcacgcccacgacgcctacctgaatgctgttgtgggaacagccctgatcaagaagtaccctaagctggaatccgagttcgtgtacggcgactacaaagtgtacgacgtgcggaagatgatcgccaagagcgagcaagagattggcaaggccaccgccaagcggttcttctactccaacatcatgaactttttcaagaccgaagtgaagctcgccaacggcgaaatccggaagaggcccctgattgagacaaatggcgagacaggcgaggtcgtgtggaacaaagagaaggacttcgccaccgtgcggaaagtgctggccatgcctcaagtgaatatcgtgaaaaagaccgaggtgcagaccggcggcttctccaaagagagcatcctgtctaagagagagagcgccaagctcatccctcggaagaaaggctgggatacacggaagtacggcggatttggaagccctaccgtggcctactctattctggtggtggccaaggtggaaaagggcaaagccaagaaactgaagtctgtgaaggtgctcgtggggatcaccatcatggaaaaaggcagctacgagaaggaccctatcggctttctggaagccaagggctacaaggacatcaaaaaagagctgatctttaagctccccaagtacagcctgttcgaactggaaaacggcagacgcagaatgctggcctctgccacagaactgcagaaagccaatgaactggtgctgccacaacacctcgtgcggctgctgtactacacccagaatatcagcgccaccaccggcagcaacaacctgggatatatcgagcagcaccgggaagagttcaaagagattttcgagaaaatcatcgacttcagcgagaagtacatcctgaagaacaaagtgaacagcaacctcaagagcagcttcgatgagcagttcgccgtgtccgactctatcctgctgtctaacagcttcgtgtccctgctgaagtacacctcctttggcgcctctggcggcttcacctttctggatctggacgtgaaacaggggagactgagataccagaccgtgactgaggtgctggacgccactctgatctaccagagcatcaccggcctgtacgagacaagaaccgatctctctcagctcggaggcgactaaaagcttctgtgccttctagttgccagccatctgttgtttgcccctcccccgtgccttccttgaccctggaaggtgccactcccactgtcctttcctaataaaatgaggaaattgcatcgcattgtctgagtaggtgtcattctattctggggggtggggtggggcaggacagcaagggggaggattgggaagacaatagcaggcatgctggggatgcggtgggctctatggacaaacccacaactacgcgtaaaaaaaaagcaccgactcggtgccactttttcaagttgataacggactagccttattttaacttgctatttctagctctaaaactcctctagaaactcgtagagggtgtttcgtggtctcatacagaacttataagattcccaaatccaaagacatttcacgtttatggtgatttcccagaacacatagcgacatgcaaatattgcagggcgccactcccctgtccctcacagccatcttcctgccagggcgcacgcgcgctgggtgttcccgcctagtgacactgggcccgcgattccttggagcgggttgatgacgtcagcgttcaaagagggcctatttcccatgattccttcatatttgcatatacgatacaaggctgttagagagataattggaattaatttgactgtaaacacaaagatattagtacaaaatacgtgacgtagaaagtaataatttcttgggtagtttgcagttttaaaattatgttttaaaatggactatcatatgcttaccgtaacttgaaagtatttcgatttcttggctttatatatcttgtggaaaggacgaaacacctgcactcctccaccttggctgttttagagctagaaatagcaagttaaaataaggctagtccgttatcaacttgaaaaagtggcaccgagtcggtgctttttttacgcgtacttgcggccgcatattcctaggatattctgggcctcatgggccttcctttcactgcccgctttccagtcgggaaacctgtcgtgccagctgcattaacatggtcatagctgtttccttgcgtattgggcgctctccgcttcctcgctcactgactcgctgcgctcggtcgttcgggtaaagcctggggtgcctaatgagcaaaaggccagcaaaaggccaggaaccgtaaaaaggccgcgttgctggcgtttttccataggctccgcccccctgacgagcatcacaaaaatcgacgctcaagtcagaggtggcgaaacccgacaggactataaagataccaggcgtttccccctggaagctccctcgtgcgctctcctgttccgaccctgccgcttaccggatacctgtccgcctttctcccttcgggaagcgtggcgctttctcatagctcacgctgtaggtatctcagttcggtgtaggtcgttcgctccaagctgggctgtgtgcacgaaccccccgttcagcccgaccgctgcgccttatccggtaactatcgtcttgagtccaacccggtaagacacgacttatcgccactggcagcagccactggtaacaggattagcagagcgaggtatgtaggcggtgctacagagttcttgaagtggtggcctaactacggctacactagaagaacagtatttggtatctgcgctctgctgaagccagttaccttcggaaaaagagttggtagctcttgatccggcaaacaaaccaccgctggtagcggtggtttttttgtttgcaagcagcagattacgcgcagaaaaaaaggatctcaagaagatcctttgatcttttctacggggtctgacgctcagtggaacgaaaactcacgttaagggattttggtcatgagattatcaaaaaggatcttcacctagatccttttaaattaaaaatgaagttttaaatcaatctaaagtatatatgagtaaacttggtctgacagttattagaaaaattcatccagcagacgataaaacgcaatacgctggctatccggtgccgcaatgccatacagcaccagaaaacgatccgcccattcgccgcccagttcttccgcaatatcacgggtggccagcgcaatatcctgataacgatccgccacgcccagacggccgcaatcaataaagccgctaaaacggccattttccaccataatgttcggcaggcacgcatcaccatgggtcaccaccagatcttcgccatccggcatgctcgctttcagacgcgcaaacagctctgccggtgccaggccctgatgttcttcatccagatcatcctgatccaccaggcccgcttccatacgggtacgcgcacgttcaatacgatgtttcgcctgatgatcaaacggacaggtcgccgggtccagggtatgcagacgacgcatggcatccgccataatgctcactttttctgccggcgccagatggctagacagcagatcctgacccggcacttcgcccagcagcagccaatcacggcccgcttcggtcaccacatccagcaccgccgcacacggaacaccggtggtggccagccagctcagacgcgccgcttcatcctgcagctcgttcagcgcaccgctcagatcggttttcacaaacagcaccggacgaccctgcgcgctcagacgaaacaccgccgcatcagagcagccaatggtctgctgcgcccaatcatagccaaacagacgttccacccacgctgccgggctacccgcatgcaggccatcctgttcaatcatactcttcctttttcaatattattgaagcatttatcagggttattgtctcatgagcggatacatatttgaatgtatttagaaaaataaacaaataggggttccgcgcacatttccccgaaaagtgccac

SEQ ID NO: 2 - protein, 1601 aa, Artificial Sequence
  dScCas9-FokI
  misc_feature: synthetic
MAPKKKRKVGGSGSQLVKSELEEKKSELRHKLKYVPHEYIELIEIARNSTQDRILEMKVMEFFMKVYGYRGKHLGGSRKPDGAIYTVGSPIDYGVIVDTKAYSGGYNLPIGQADEMQRYVEENQTRNKHINPNEWWKVYPSSVTEFKFLFVSGHFKGNYKAQLTRLNHITNCNGAVLSVEELLIGGEMIKAGTLTLEEVRRKFNNGEINFSGSETPGTSESATPESMEKKYSIGLAIGTNSVGWAVITDDYKVPSKKFKVLGNTNRKSIKKNLMGALLFDSGETAEATRLKRTARRRYTRRKNRIRYLQEIFANEMAKLDDSFFQRLEESFLVEEDKKNERHPIFGNLADEVAYHRNYPTIYHLRKKLADSPEKADLRLIYLALAHIIKFRGHFLIEGKLNAENSDVAKLFYQLIQTYNQLFEESPLDEIEVDAKGILSARLSKSKRLEKLIAVFPNEKKNGLFGNIIALALGLTPNFKSNFDLTEDAKLQLSKDTYDDDLDELLGQIGDQYADLFSAAKNLSDAILLSDILRSNSEVTKAPLSASMVKRYDEHHQDLALLKTLVRQQFPEKYAEIFKDDTKNGYAGYVGIGIKHRKRTTKLATQEEFYKFIKPILEKMDGAEELLAKLNRDDLLRKQRTFDNGSIPHQIHLKELHAILRRQEEFYPFLKENREKIEKILTFRIPYYVGPLARGNSRFAWLTRKSEEAITPWNFEEVVDKGASAQSFIERMTNFDEQLPNKKVLPKHSLLYEYFTVYNELTKVKYVTERMRKPEFLSGEQKKAIVDLLFKTNRKVTVKQLKEDYFKKIECFDSVEIIGVEDRFNASLGTYHDLLKIIKDKDFLDNEENEDILEDIVLTLTLFEDREMIEERLKTYAHLFDDKVMKQLKRRHYTGWGRLSRKMINGIRDKQSGKTILDFLKSDGFSNRNFMQLIHDDSLTFKEEIEKAQVSGQGDSLHEQIADLAGSPAIKKGILQTVKIVDELVKVMGHKPENIVIEMARENQTTTKGLQQSRERKKRIEEGIKELESQILKENPVENTQLQNEKLYLYYLQNGRDMYVDQELDINRLSDYDVDAIVPQSFIKDDSIDNKVLTRSVENRGKSDNVPSEEVVKKMKNYWRQLLNAKLITQRKFDNLTKAERGGLSEADKAGFIKRQLVETRQITKHVARILDSRMNTKRDKNDKPIREVKVITLKSKLVSDFRKDFQLYKVRDINNYHHAHDAYLNAVVGTALIKKYPKLESEFVYGDYKVYDVRKMIAKSEQEIGKATAKRFFYSNIMNFFKTEVKLANGEIRKRPLIETNGETGEVVWNKEKDFATVRKVLAMPQVNIVKKTEVQTGGFSKESILSKRESAKLIPRKKGWDTRKYGGFGSPTVAYSILVVAKVEKGKAKKLKSVKVLVGITIMEKGSYEKDPIGFLEAKGYKDIKKELIFKLPKYSLFELENGRRRMLASATELQKANELVLPQHLVRLLYYTQNISATTGSNNLGYIEQHREEFKEIFEKIIDFSEKYILKNKVNSNLKSSFDEQFAVSDSILLSNSFVSLLKYTSFGASGGFTFLDLDVKQGRLRYQTVTEVLDATLIYQSITGLYETRTDLSQLGGD

SEQ ID NO: 3 - DNA, 697 bp, Artificial Sequence
  EMX1sgRNA27T1-NNG
  misc_feature: synthetic
tacgcgtaaaaaaaaagcaccgactcggtgccactttttcaagttgataacggactagccttattttaacttgctatttctagctctaaaactcctctagaaactcgtagagggtgtttcgtggtctcatacagaacttataagattcccaaatccaaagacatttcacgtttatggtgatttcccagaacacatagcgacatgcaaatattgcagggcgccactcccctgtccctcacagccatcttcctgccagggcgcacgcgcgctgggtgttcccgcctagtgacactgggcccgcgattccttggagcgggttgatgacgtcagcgttcaaagagggcctatttcccatgattccttcatatttgcatatacgatacaaggctgttagagagataattggaattaatttgactgtaaacacaaagatattagtacaaaatacgtgacgtagaaagtaataatttcttgggtagtttgcagttttaaaattatgttttaaaatggactatcatatgcttaccgtaacttgaaagtatttcgatttcttggctttatatatcttgtggaaaggacgaaacacctgcactcctccaccttggctgttttagagctagaaatagcaagttaaaataaggctagtccgttatcaacttgaaaaagtggcaccgagtcggtgctttttttacgcgta

SEQ ID NO: 4 - DNA, 695 bp, Artificial Sequence
  EMX1SGRNA15T1-NNG
  misc_feature: synthetic
acgcgtaaaaaaaaagcaccgactcggtgccactttttcaagttgataacggactagccttattttaacttgctatttctagctctaaaactagaaactcgtagagtcccaggtgtttcgtggtctcatacagaacttataagattcccaaatccaaagacatttcacgtttatggtgatttcccagaacacatagcgacatgcaaatattgcagggcgccactcccctgtccctcacagccatcttcctgccagggcgcacgcgcgctgggtgttcccgcctagtgacactgggcccgcgattccttggagcgggttgatgacgtcagcgttcaaagagggcctatttcccatgattccttcatatttgcatatacgatacaaggctgttagagagataattggaattaatttgactgtaaacacaaagatattagtacaaaatacgtgacgtagaaagtaataatttcttgggtagtttgcagttttaaaattatgttttaaaatggactatcatatgcttaccgtaacttgaaagtatttcgatttcttggctttatatatcttgtggaaaggacgaaacaccagagcctgcactcctccaccgttttagagctagaaatagcaagttaaaataaggctagtccgttatcaacttgaaaaagtggcaccgagtcggtgctttttttacgcgt

SEQ ID NO: 5 - DNA, 28 bp, Artificial Sequence
  Primer 3157
  misc_feature: synthetic
attagttcatagcccatatatggagttc

SEQ ID NO: 6 - DNA, 22 bp, Artificial Sequence
  Primer 3158
  misc_feature: synthetic
tacgcgtagttgtgggtttgtc

SEQ ID NO: 7 - DNA, 42 bp, Artificial Sequence
  Primer 3206
  misc_feature: synthetic
tccagagagagaaagaagcgcggcggactgtctgaagctgat

SEQ ID NO: 8 - DNA, 42 bp, Artificial Sequence
  Primer 3207
  misc_feature: synthetic
atcagcttcagacagtccgccgcgcttctttctctctctgga

SEQ ID NO: 9 - DNA, 8282 bp, Artificial Sequence
  Plasmid 11248 dScCas9-FokI dHNH-F-NNG EMX1 T1 sgRNA 27
  misc_feature: synthetic
ctaaattgtaagcgttaatattttgttaaaattcgcgttaaatttttgttaaatcagctcattttttaaccaataggccgaaatcggcaaaatcccttataaatcaaaagaatagaccgagatagggttgagtggccgctacagggcgctcccattcgccattcaggctgcgcaactgttgggaagggcgtttcggtgcgggcctcttcgctattacgccagctggcgaaagggggatgtgctgcaaggcgattaagttgggtaacgccagggttttcccagtcacgacgttgtaaaacgacggccagtgagcgcgacgtaatacgactcactatagggcgaattgaaggaaggccgtcaaggccgcatatagtaatcaattacggggtcattagttcatagcccatatatggagttccgcgttacataacttacggtaaatggcccgcctggctgaccgcccaacgacccccgcccattgacgtcaataatgacgtatgttcccatagtaacgccaatagggactttccattgacgtcaatgggtggagtatttacggtaaactgcccacttggcagtacatcaagtgtatcatatgccaagtacgccccctattgacgtcaatgacggtaaatggcccgcctggcattatgcccagtacatgaccttatgggactttcctacttggcagtacatctacgtattagtcatcgctattaccatggtgatgcggttttggcagtacatcaatgggcgtggatagcggtttgactcacggggatttccaagtctccaccccattgacgtcaatgggagtttgttttggcaccaaaatcaacgggactttccaaaatgtcgtaacaactccgccccattgacgcaaatgggcggtaggcgtgtacggtgggaggtctatataagcagagctggtttagtgaaccgtcagatccgctagcgctaccggtatggcccctaagaagaagagaaaagtcggcggctctggcagccagctggtcaagtctgagctggaagagaagaaaagcgagctgcggcacaagctgaaatacgtgccccacgagtacatcgagctgatcgagatcgccagaaacagcacccaggacagaatcctggaaatgaaggtcatggaattctttatgaaggtgtacggctaccggggcaagcacctcggaggatctagaaagcctgacggcgccatctataccgtgggcagccctatcgattacggcgtgatcgtggataccaaggcctacagcggcggctacaatctgcctattggacaggccgacgagatgcagagatacgtggaagaaaaccagacacggaacaagcacatcaaccccaacgagtggtggaaagtgtaccccagcagcgtgaccgagttcaagttcctgttcgtgtccggccacttcaagggcaactacaaggcccagctgacccggctgaaccacatcacaaattgcaacggcgctgtgctgtctgtggaagaactgctgatcggcggcgagatgatcaaggccggaacactgacactggaagaagtgcggcggaagttcaacaacggcgagatcaacttcagcggcagcgagacacctggcacatctgaatctgccacacctgagagcatggaaaagaagtacagcatcggcctggccatcggcacaaattctgttggctgggccgtgatcaccgacgactacaaggtgcccagcaagaaattcaaggtgctgggcaacaccaaccggaagtccatcaagaaaaacctgatgggcgccctgctgttcgattctggcgaaacagccgaggccaccagactgaagagaaccgccagaagaagatacacccggcggaagaaccggatcagatacctgcaagagatcttcgccaacgagatggccaagctggacgacagcttctttcagagactggaagagtccttcctggtggaagaggacaagaagaacgagcggcaccccatcttcggcaatctggctgatgaggtggcctaccacagaaactaccccaccatctaccacctgaggaagaagctggccgactctcctgagaaggccgacctgagactgatctatctggccctggctcacatcatcaagttccggggccacttcctgatcgagggcaagctgaatgccgagaacagcgacgtggccaaactgttctaccagctgatccagacctacaaccagctgttcgaggaaagccctctggacgagattgaggtggacgccaagggaatcctgagcgccagactgagcaagagcaagcggctggaaaagctgatcgccgtgtttcccaacgagaagaagaatggcctgttcggcaacatcattgccctggcactgggcctgacacctaacttcaagtccaacttcgacctgaccgaggacgccaaactgcagctgagcaaggacacctacgacgacgatctggatgagctgctgggccagatcggagatcagtacgccgatctgttcagcgccgccaagaatctgtctgacgccatcctgctgagcgacatcctgagatccaacagcgaagtgacaaaggcccctctgagcgcctccatggtcaagagatatgacgagcaccaccaggacctggctctgctgaaaacccttgtgcggcagcagttccccgagaagtatgccgagatcttcaaggacgacaccaagaacggctacgccggctatgttggcatcggcatcaagcacagaaagcggaccaccaagctggccacacaagaggaattctacaagttcatcaagcccatcctcgagaagatggacggcgccgaagaactcctggctaagctgaacagggacgacctgctgcggaagcagagaaccttcgacaatggcagcatccctcaccagatccacctgaaagagctgcacgccattctgcggcggcaagaagagttctacccattcctgaaagaaaaccgggaaaagattgagaagatcctgaccttcaggatcccctactacgtgggaccactggccagaggcaatagcagattcgcttggctgaccagaaagagcgaggaagccatcacaccctggaacttcgaggaagtggtggataagggcgccagcgctcagtccttcatcgagcggatgaccaatttcgacgagcagctgcccaacaagaaggtgctgcctaagcacagcctgctgtacgagtacttcaccgtgtacaatgagctgaccaaagtcaaatacgtgacagagcggatgcggaagcctgagtttctgagcggcgagcagaaaaaggccatcgtggatctgctgttcaagaccaacagaaaagtgaccgtgaagcagctgaaagaggactacttcaagaaaatcgagtgcttcgacagcgtcgagatcatcggcgtggaagatagattcaacgccagcctgggcacataccacgatctgctgaagattatcaaggacaaggacttcctggacaacgaggaaaacgaggacatcctggaagatatcgtgctgaccctgacactgtttgaggacagagagatgatcgaggaacggctgaaaacatacgcccacctgttcgacgacaaagtgatgaagcaactgaagcggcggcactacacaggctggggcagactgtccagaaagatgattaacggcatccgggacaagcagagcggcaagaccatcctggactttctgaagtccgacggcttcagcaaccggaacttcatgcagctgattcacgacgacagcctcaccttcaaagaggaaatcgagaaggcccaggtttccggccagggcgattctctgcacgagcagattgctgatctggccggatctcccgccattaagaagggcatcctgcagacagtgaagatcgtggacgaactcgtgaaagtgatgggccacaagcctgagaacatcgtgatcgaaatggccagagagaaccagaccaccaccaagggcctgcagcagtccagagagagaaagaagcgcggcggactgtctgaagctgataaggccggcttcattaagcggcagctggtggaaacccggcagatcacaaagcacgtggcccggatcctggacagcagaatgaacaccaagcgggacaagaacgacaagcctatccgggaagtgaaagtcatcaccctgaagtccaagctggtgtccgatttccggaaggatttccagctgtacaaagtgcgcgacatcaacaactaccatcacgcccacgacgcctacctgaatgctgttgtgggaacagccctgatcaagaagtaccctaagctggaatccgagttcgtgtacggcgactacaaagtgtacgacgtgcggaagatgatcgccaagagcgagcaagagattggcaaggccaccgccaagcggttcttctactccaacatcatgaactttttcaagaccgaagtgaagctcgccaacggcgaaatccggaagaggcccctgattgagacaaatggcgagacaggcgaggtcgtgtggaacaaagagaaggacttcgccaccgtgcggaaagtgctggccatgcctcaagtgaatatcgtgaaaaagaccgaggtgcagaccggcggcttctccaaagagagcatcctgtctaagagagagagcgccaagctcatccctcggaagaaaggctgggatacacggaagtacggcggatttggaagccctaccgtggcctactctattctggtggtggccaaggtggaaaagggcaaagccaagaaactgaagtctgtgaaggtgctcgtggggatcaccatcatggaaaaaggcagctacgagaaggaccctatcggctttctggaagccaagggctacaaggacatcaaaaaagagctgatctttaagctccccaagtacagcctgttcgaactggaaaacggcagacgcagaatgctggcctctgccacagaactgcagaaagccaatgaactggtgctgccacaacacctcgtgcggctgctgtactacacccagaatatcagcgccaccaccggcagcaacaacctgggatatatcgagcagcaccgggaagagttcaaagagattttcgagaaaatcatcgacttcagcgagaagtacatcctgaagaacaaagtgaacagcaacctcaagagcagcttcgatgagcagttcgccgtgtccgactctatcctgctgtctaacagcttcgtgtccctgctgaagtacacctcctttggcgcctctggcggcttcacctttctggatctggacgtgaaacaggggagactgagataccagaccgtgactgaggtgctggacgccactctgatctaccagagcatcaccggcctgtacgagacaagaaccgatctctctcagctcggaggcgactaaaagcttctgtgccttctagttgccagccatctgttgtttgcccctcccccgtgccttccttgaccctggaaggtgccactcccactgtcctttcctaataaaatgaggaaattgcatcgcattgtctgagtaggtgtcattctattctggggggtggggtggggcaggacagcaagggggaggattgggaagacaatagcaggcatgctggggatgcggtgggctctatggacaaacccacaactacgcgtaaaaaaaaagcaccgactcggtgccactttttcaagttgataacggactagccttattttaacttgctatttctagctctaaaactcctctagaaactcgtagagggtgtttcgtggtctcatacagaacttataagattcccaaatccaaagacatttcacgtttatggtgatttcccagaacacatagcgacatgcaaatattgcagggcgccactcccctgtccctcacagccatcttcctgccagggcgcacgcgcgctgggtgttcccgcctagtgacactgggcccgcgattccttggagcgggttgatgacgtcagcgttcaaagagggcctatttcccatgattccttcatatttgcatatacgatacaaggctgttagagagataattggaattaatttgactgtaaacacaaagatattagtacaaaatacgtgacgtagaaagtaataatttcttgggtagtttgcagttttaaaattatgttttaaaatggactatcatatgcttaccgtaacttgaaagtatttcgatttcttggctttatatatcttgtggaaaggacgaaacacctgcactcctccaccttggctgttttagagctagaaatagcaagttaaaataaggctagtccgttatcaacttgaaaaagtggcaccgagtcggtgctttttttacgcgtacttgcggccgcatattcctaggatattctgggcctcatgggccttcctttcactgcccgctttccagtcgggaaacctgtcgtgccagctgcattaacatggtcatagctgtttccttgcgtattgggcgctctccgcttcctcgctcactgactcgctgcgctcggtcgttcgggtaaagcctggggtgcctaatgagcaaaaggccagcaaaaggccaggaaccgtaaaaaggccgcgttgctggcgtttttccataggctccgcccccctgacgagcatcacaaaaatcgacgctcaagtcagaggtggcgaaacccgacaggactataaagataccaggcgtttccccctggaagctccctcgtgcgctctcctgttccgaccctgccgcttaccggatacctgtccgcctttctcccttcgggaagcgtggcgctttctcatagctcacgctgtaggtatctcagttcggtgtaggtcgttcgctccaagctgggctgtgtgcacgaaccccccgttcagcccgaccgctgcgccttatccggtaactatcgtcttgagtccaacccggtaagacacgacttatcgccactggcagcagccactggtaacaggattagcagagcgaggtatgtaggcggtgctacagagttcttgaagtggtggcctaactacggctacactagaagaacagtatttggtatctgcgctctgctgaagccagttaccttcggaaaaagagttggtagctcttgatccggcaaacaaaccaccgctggtagcggtggtttttttgtttgcaagcagcagattacgcgcagaaaaaaaggatctcaagaagatcctttgatcttttctacggggtctgacgctcagtggaacgaaaactcacgttaagggattttggtcatgagattatcaaaaaggatcttcacctagatccttttaaattaaaaatgaagttttaaatcaatctaaagtatatatgagtaaacttggtctgacagttattagaaaaattcatccagcagacgataaaacgcaatacgctggctatccggtgccgcaatgccatacagcaccagaaaacgatccgcccattcgccgcccagttcttccgcaatatcacgggtggccagcgcaatatcctgataacgatccgccacgcccagacggccgcaatcaataaagccgctaaaacggccattttccaccataatgttcggcaggcacgcatcaccatgggtcaccaccagatcttcgccatccggcatgctcgctttcagacgcgcaaacagctctgccggtgccaggccctgatgttcttcatccagatcatcctgatccaccaggcccgcttccatacgggtacgcgcacgttcaatacgatgtttcgcctgatgatcaaacggacaggtcgccgggtccagggtatgcagacgacgcatggcatccgccataatgctcactttttctgccggcgccagatggctagacagcagatcctgacccggcacttcgcccagcagcagccaatcacggcccgcttcggtcaccacatccagcaccgccgcacacggaacaccggtggtggccagccagctcagacgcgccgcttcatcctgcagctcgttcagcgcaccgctcagatcggttttcacaaacagcaccggacgaccctgcgcgctcagacgaaacaccgccgcatcagagcagccaatggtctgctgcgcccaatcatagccaaacagacgttccacccacgctgccgggctacccgcatgcaggccatcctgttcaatcatactcttcctttttcaatattattgaagcatttatcagggttattgtctcatgagcggatacatatttgaatgtatttagaaaaataaacaaataggggttccgcgcacatttccccgaaaagtgccac

SEQ ID NO: 10 - protein, 1482 aa, Artificial Sequence
  dScCas9-FokI dHNH Protein sequence
  misc_feature: synthetic
MAPKKKRKVGGSGSQLVKSELEEKKSELRHKLKYVPHEYIELIEIARNSTQDRILEMKVMEFFMKVYGYRGKHLGGSRKPDGAIYTVGSPIDYGVIVDTKAYSGGYNLPIGQADEMQRYVEENQTRNKHINPNEWWKVYPSSVTEFKFLFVSGHFKGNYKAQLTRLNHITNCNGAVLSVEELLIGGEMIKAGTLTLEEVRRKFNNGEINFSGSETPGTSESATPESMEKKYSIGLAIGTNSVGWAVITDDYKVPSKKFKVLGNTNRKSIKKNLMGALLFDSGETAEATRLKRTARRRYTRRKNRIRYLQEIFANEMAKLDDSFFQRLEESFLVEEDKKNERHPIFGNLADEVAYHRNYPTIYHLRKKLADSPEKADLRLIYLALAHIIKFRGHFLIEGKLNAENSDVAKLFYQLIQTYNQLFEESPLDEIEVDAKGILSARLSKSKRLEKLIAVFPNEKKNGLFGNIIALALGLTPNFKSNFDLTEDAKLQLSKDTYDDDLDELLGQIGDQYADLFSAAKNLSDAILLSDILRSNSEVTKAPLSASMVKRYDEHHQDLALLKTLVRQQFPEKYAEIFKDDTKNGYAGYVGIGIKHRKRTTKLATQEEFYKFIKPILEKMDGAEELLAKLNRDDLLRKQRTFDNGSIPHQIHLKELHAILRRQEEFYPFLKENREKIEKILTFRIPYYVGPLARGNSRFAWLTRKSEEAITPWNFEEVVDKGASAQSFIERMTNFDEQLPNKKVLPKHSLLYEYFTVYNELTKVKYVTERMRKPEFLSGEQKKAIVDLLFKTNRKVTVKQLKEDYFKKIECFDSVEIIGVEDRFNASLGTYHDLLKIIKDKDFLDNEENEDILEDIVLTLTLFEDREMIEERLKTYAHLFDDKVMKQLKRRHYTGWGRLSRKMINGIRDKQSGKTILDFLKSDGFSNRNFMQLIHDDSLTFKEEIEKAQVSGQGDSLHEQIADLAGSPAIKKGILQTVKIVDELVKVMGHKPENIVIEMARENQTTTKGLQQSRERKKRGGSGGLSEADKAGFIKRQLVETRQITKHVARILDSRMNTKRDKNDKPIREVKVITLKSKLVSDFRKDFQLYKVRDINNYHHAHDAYLNAVVGTALIKKYPKLESEFVYGDYKVYDVRKMIAKSEQEIGKATAKRFFYSNIMNFFKTEVKLANGEIRKRPLIETNGETGEVVWNKEKDFATVRKVLAMPQVNIVKKTEVQTGGFSKESILSKRESAKLIPRKKGWDTRKYGGFGSPTVAYSILVVAKVEKGKAKKLKSVKVLVGITIMEKGSYEKDPIGFLEAKGYKDIKKELIFKLPKYSLFELENGRRRMLASATELQKANELVLPQHLVRLLYYTQNISATTGSNNLGYIEQHREEFKEIFEKIIDFSEKYILKNKVNSNLKSSFDEQFAVSDSILLSNSFVSLLKYTSFGASGGFTFLDLDVKQGRLRYQTVTEVLDATLIYQSITGLYETRTDLSQLGGD

SEQ ID NO: 11 - DNA, 697 bp, Artificial Sequence; identical to SEQ ID NO: 3
  EMX1sgRNA27T1-NNG
  misc_feature: synthetic

SEQ ID NO: 12 - DNA, 695 bp, Artificial Sequence; identical to SEQ ID NO: 4
  EMX1sgRNA15T1-NNG
  misc_feature: synthetic

SEQ ID NO: 13 - DNA, 7593 bp, Artificial Sequence
  Plasmid 11254
  misc_feature: synthetic
ctaaattgtaagcgttaatattttgttaaaattcgcgttaaatttttgttaaatcagctcattttttaaccaataggccgaaatcggcaaaatcccttataaatcaaaagaatagaccgagatagggttgagtggccgctacagggcgctcccattcgccattcaggctgcgcaactgttgggaagggcgtttcggtgcgggcctcttcgctattacgccagctggcgaaagggggatgtgctgcaaggcgattaagttgggtaacgccagggttttcccagtcacgacgttgtaaaacgacggccagtgagcgcgacgtaatacgactcactatagggcgaattgaaggaaggccgtcaaggccgcatatagtaatcaattacggggtcattagttcatagcccatatatggagttccgcgttacataacttacggtaaatggcccgcctggctgaccgcccaacgacccccgcccattgacgtcaataatgacgtatgttcccatagtaacgccaatagggactttccattgacgtcaatgggtggagtatttacggtaaactgcccacttggcagtacatcaagtgtatcatatgccaagtacgccccctattgacgtcaatgacggtaaatggcccgcctggcattatgcccagtacatgaccttatgggactttcctacttggcagtacatctacgtattagtcatcgctattaccatggtgatgcggttttggcagtacatcaatgggcgtggatagcggtttgactcacggggatttccaagtctccaccccattgacgtcaatgggagtttgttttggcaccaaaatcaacgggactttccaaaatgtcgtaacaactccgccccattgacgcaaatgggcggtaggcgtgtacggtgggaggtctatataagcagagctggtttagtgaaccgtcagatccgctagcgctaccggtatggcccctaagaagaagagaaaagtcggcggctctggcagccagctggtcaagtctgagctggaagagaagaaaagcgagctgcggcacaagctgaaatacgtgccccacgagtacatcgagctgatcgagatcgccagaaacagcacccaggacagaatcctggaaatgaaggtcatggaattctttatgaaggtgtacggctaccggggcaagcacctcggaggatctagaaagcctgacggcgccatctataccgtgggcagccctatcgattacggcgtgatcgtggataccaaggcctacagcggcggctacaatctgcctattggacaggccgacgagatgcagagatacgtggaagaaaaccagacacggaacaagcacatcaaccccaacgagtggtggaaagtgtaccccagcagcgtgaccgagttcaagttcctgttcgtgtccggccacttcaagggcaactacaaggcccagctgacccggctgaaccacatcacaaattgcaacggcgctgtgctgtctgtggaagaactgctgatcggcggcgagatgatcaaggccggaacactgacactggaagaagtgcggcggaagttcaacaacggcgagatcaacttcagcggcagcgagacacctggcacatctgaatctgccacacctgagagcatggaaaagaagtacagcatcggcctggccatcggcacaaattctgttggctgggccgtgatcaccgacgactacaaggtgcccagcaagaaattcaaggtgctgggcaacaccaaccggaagtccatcaagaaaaacctgatgggcgccctgctgttcgattctggcgaaacagccgaggccaccagactgaagagaaccgccagaagaagatacacccggcggaagaaccggatcagatacctgcaagagatcttcgccaacgagatggccaagctggacgacagcttctttcagagactggaagagtccttcctggtggaagaggacaagaagaacgagcggcaccccatcttcggcaatctggctgatgaggtggcctaccacagaaactaccccaccatctaccacctgaggaagaagctggccgactctcctgagaaggccgacctgagactgatctatctggccctggctcacatcatcaagttccggggccacttcctgatcgagggcaagctgaatgccgagaacagcgacgtggccaaactgttctaccagctgatccagacctacaaccagctgttcgaggaaagccctctggacgagattgaggtggacgccaagggaatcctgagcgccagactgagcaagagcaagcggctggaaaagctgatcgccgtgtttcccaacgagaagaagaatggcctgttcggcaacatcattgccctggcactgggcctgacacctaacttcaagtccaacttcgacctgaccgaggacgccaaactgcagctgagcaaggacacctacgacgacgatctggatgagctgctgggccagatcggagatcagtacgccgatctgttcagcgccgccaagaatctgtctgacgccatcctgctgagcgacatcctgagatccaacagcgaagtgacaaaggcccctctgagcgcctccatggtcaagagatatgacgagcaccaccaggacctggctctgctgaaaacccttgtgcggcagcagttccccgagaagtatgccgagatcttcaaggacgacaccaagaacggctacgccggctatgttggcatcggcatcaagcacagaaagcggaccaccaagctggccacacaagaggaattctacaagttcatcaagcccatcctcgagaagatggacggcgccgaagaactcctggctaagctgaacagggacgacctgctgcggaagcagagaaccttcgacaatggcagcatccctcaccagatccacctgaaagagctgcacgccattctgcggcggcaagaagagttctacccattcctgaaagaaaaccgggaaaagattgagaagatcctgaccttcaggatcccctactacgtgggaccactggccagaggcaatagcagattcgcttggctgaccagaaagagcgaggaagccatcacaccctggaacttcgaggaagtggtggataagggcgccagcgctcagtccttcatcgagcggatgaccaatttcgacgagcagctgcccaacaagaaggtgctgcctaagcacagcctgctgtacgagtacttcaccgtgtacaatgagctgaccaaagtcaaatacgtgacagagcggatgcggaagcctgagtttctgagcggcgagcagaaaaaggccatcgtggatctgctgttcaagaccaacagaaaagtgaccgtgaagcagctgaaagaggactacttcaagaaaatcgagtgcttcgacagcgtcgagatcatcggcgtggaagatagattcaacgccagcctgggcacataccacgatctgctgaagattatcaaggacaaggacttcctggacaacgaggaaaacgaggacatcctggaagatatcgtgctgaccctgacactgtttgaggacagagagatgatcgaggaacggctgaaaacatacgcccacctgttcgacgacaaagtgatgaagcaactgaagcggcggcactacacaggctggggcagactgtccagaaagatgattaacggcatccgggacaagcagagcggcaagaccatcctggactttctgaagtccgacggcttcagcaaccggaacttcatgcagctgattcacgacgacagcctcaccttcaaagaggaaatcgagaaggcccaggtttccggccagggcgattctctgcacgagcagattgctgatctggccggatctcccgccattaagaagggcatcctgcagacagtgaagatcgtggacgaactcgtgaaagtgatgggccacaagcctgagaacatcgtgatcgaaatggccagagagaaccagaccaccaccaagggcctgcagcagtccagagagagaaagaagcgcggcggactgtctgaagctgataaggccggcttcattaagcggcagctggtggaaacccggcagatcacaaagcacgtggcccggatcctggacagcagaatgaacaccaagcgggacaagaacgacaagcctatccgggaagtgaaagtcatcaccctgaagtccaagctggtgtccgatttccggaaggatttccagctgtacaaagtgcgcgacatcaacaactaccatcacgcccacgacgcctacctgaatgctgttgtgggaacagccctgatcaagaagtaccctaagctggaatccgagttcgtgtacggcgactacaaagtgtacgacgtgcggaagatgatcgccaagagcgagcaagagattggcaaggccaccgccaagcggttcttctactccaacatcatgaactttttcaagaccgaagtgaagctcgccaacggcgaaatccggaagaggcccctgattgagacaaatggcgagacaggcgaggtcgtgtggaacaaagagaaggacttcgccaccgtgcggaaagtgctggccatgcctcaagtgaatatcgtgaaaaagaccgaggtgcagaccggcggcttctccaaagagagcatcctgtctaagagagagagcgccaagctcatccctcggaagaaaggctgggatacacggaagtacggcggatttggaagccctaccgtggcctactctattctggtggtggccaaggtggaaaagggcaaagccaagaaactgaagtctgtgaaggtgctcgtggggatcaccatcatggaaaaaggcagctacgagaaggaccctatcggctttctggaagccaagggctacaaggacatcaaaaaagagctgatctttaagctccccaagtacagcctgttcgaactggaaaacggcagacgcagaatgctggcctctgccacagaactgcagaaagccaatgaactggtgctgccacaacacctcgtgcggctgctgtactacacccagaatatcagcgccaccaccggcagcaacaacctgggatatatcgagcagcaccgggaagagttcaaagagattttcgagaaaatcatcgacttcagcgagaagtacatcctgaagaacaaagtgaacagcaacctcaagagcagcttcgatgagcagttcgccgtgtccgactctatcctgctgtctaacagcttcgtgtccctgctgaagtacacctcctttggcgcctctggcggcttcacctttctggatctggacgtgaaacaggggagactgagataccagaccgtgactgaggtgctggacgccactctgatctaccagagcatcaccggcctgtacgagacaagaaccgatctctctcagctcggaggcgactaaaagcttctgtgccttctagttgccagccatctgttgtttgcccctcccccgtgccttccttgaccctggaaggtgccactcccactgtcctttcctaataaaatgaggaaattgcatcgcattgtctgagtaggtgtcattctattctggggggtggggtggggcaggacagcaagggggaggattgggaagacaatagcaggcatgctggggatgcggtgggctctatggacaaacccacaactacgcgtacttgcggccgcatattcctaggatattctgggcctcatgggccttcctttcactgcccgctttccagtcgggaaacctgtcgtgccagctgcattaacatggtcatagctgtttccttgcgtattgggcgctctccgcttcctcgctcactgactcgctgcgctcggtcgttcgggtaaagcctggggtgcctaatgagcaaaaggccagcaaaaggccaggaaccgtaaaaaggccgcgttgctggcgtttttccataggctccgcccccctgacgagcatcacaaaaatcgacgctcaagtcagaggtggcgaaacccgacaggactataaagataccaggcgtttccccctggaagctccctcgtgcgctctcctgttccgaccctgccgcttaccggatacctgtccgcctttctcccttcgggaagcgtggcgctttctcatagctcacgctgtaggtatctcagttcggtgtaggtcgttcgctccaagctgggctgtgtgcacgaaccccccgttcagcccgaccgctgcgccttatccggtaactatcgtcttgagtccaacccggtaagacacgacttatcgccactggcagcagccactggtaacaggattagcagagcgaggtatgtaggcggtgctacagagttcttgaagtggtggcctaactacggctacactagaagaacagtatttggtatctgcgctctgctgaagccagttaccttcggaaaaagagttggtagctcttgatccggcaaacaaaccaccgctggtagcggtggtttttttgtttgcaagcagcagattacgcgcagaaaaaaaggatctcaagaagatcctttgatcttttctacggggtctgacgctcagtggaacgaaaactcacgttaagggattttggtcatgagattatcaaaaaggatcttcacctagatccttttaaattaaaaatgaagttttaaatcaatctaaagtatatatgagtaaacttggtctgacagttattagaaaaattcatccagcagacgataaaacgcaatacgctggctatccggtgccgcaatgccatacagcaccagaaaacgatccgcccattcgccgcccagttcttccgcaatatcacgggtggccagcgcaatatcctgataacgatccgccacgcccagacggccgcaatcaataaagccgctaaaacggccattttccaccataatgttcggcaggcacgcatcaccatgggtcaccaccagatcttcgccatccggcatgctcgctttcagacgcgcaaacagctctgccggtgccaggccctgatgttcttcatccagatcatcctgatccaccaggcccgcttccatacgggtacgcgcacgttcaatacgatgtttcgcctgatgatcaaacggacaggtcgccgggtccagggtatgcagacgacgcatggcatccgccataatgctcactttttctgccggcgccagatggctagacagcagatcctgacccggcacttcgcccagcagcagccaatcacggcccgcttcggtcaccacatccagcaccgccgcacacggaacaccggtggtggccagccagctcagacgcgccgcttcatcctgcagctcgttcagcgcaccgctcagatcggttttcacaaacagcaccggacgaccctgcgcgctcagacgaaacaccgccgcatcagagcagccaatggtctgctgcgcccaatcatagccaaacagacgttccacccacgctgccgggctacccgcatgcaggccatcctgttcaatcatactcttcctttttcaatattattgaagcatttatcagggttattgtctcatgagcggatacatatttgaatgtatttagaaaaataaacaaataggggttccgcgcacatttccccgaaaagtgccac

SEQ ID NO: 14 - protein, 1353 aa, Artificial Sequence
  dScCas9-FokI.dHNH.dREC2
  misc_feature: synthetic
MAPKKKRKVGGSGSQLVKSELEEKKSELRHKLKYVPHEYIELIEIARNSTQDRILEMKVMEFFMKVYGYRGKHLGGSRKPDGAIYTVGSPIDYGVIVDTKAYSGGYNLPIGQADEMQRYVEENQTRNKHINPNEWWKVYPSSVTEFKFLFVSGHFKGNYKAQLTRLNHITNCNGAVLSVEELLIGGEMIKAGTLTLEEVRRKFNNGEINFSGSETPGTSESATPESMEKKYSIGLAIGTNSVGWAVITDDYKVPSKKFKVLGNTNRKSIKKNLMGALLFDSGETAEATRLKRTARRRYTRRKNRIRYLQEIFANEMAKLDDSFFQRLEESFLVEEDKKNERHPIFGNLADEVAYHRNYPTIYHLRKKLADSPEKADLRLIYLALAHIIKFRGHFLIEGKLGGSGSNSEVTKAPLSASMVKRYDEHHQDLALLKTLVRQQFPEKYAEIFKDDTKNGYAGYVGIGIKHRKRTTKLATQEEFYKFIKPILEKMDGAEELLAKLNRDDLLRKQRTFDNGSIPHQIHLKELHAILRRQEEFYPFLKENREKIEKILTFRIPYYVGPLARGNSRFAWLTRKSEEAITPWNFEEVVDKGASAQSFIERMTNFDEQLPNKKVLPKHSLLYEYFTVYNELTKVKYVTERMRKPEFLSGEQKKAIVDLLFKTNRKVTVKQLKEDYFKKIECFDSVEIIGVEDRFNASLGTYHDLLKIIKDKDFLDNEENEDILEDIVLTLTLFEDREMIEERLKTYAHLFDDKVMKQLKRRHYTGWGRLSRKMINGIRDKQSGKTILDFLKSDGFSNRNFMQLIHDDSLTFKEEIEKAQVSGQGDSLHEQIADLAGSPAIKKGILQTVKIVDELVKVMGHKPENIVIEMARENQTTTKGLQQSRERKKRGGSGGLSEADKAGFIKRQLVETRQITKHVARILDSRMNTKRDKNDKPIREVKVITLKSKLVSDFRKDFQLYKVRDINNYHHAHDAYLNAVVGTALIKKYPKLESEFVYGDYKVYDVRKMIAKSEQEIGKATAKRFFYSNIMNFFKTEVKLANGEIRKRPLIETNGETGEVVWNKEKDFATVRKVLAMPQVNIVKKTEVQTGGFSKESILSKRESAKLIPRKKGWDTRKYGGFGSPTVAYSILVVAKVEKGKAKKLKSVKVLVGITIMEKGSYEKDPIGFLEAKGYKDIKKELIFKLPKYSLFELENGRRRMLASATELQKANELVLPQHLVRLLYYTQNISATTGSNNLGYIEQHREEFKEIFEKIIDFSEKYILKNKVNSNLKSSFDEQFAVSDSILLSNSFVSLLKYTSFGASGGFTFLDLDVKQGRLRYQTVTEVLDATLIYQSITGLYETRTDLSQLGGD

SEQ ID NO: 15 - protein, 1424 aa, Artificial Sequence
  dScCas9-FokI.dHNH.dFLEX
  misc_feature: synthetic
MAPKKKRKVGGSGSQLVKSELEEKKSELRHKLKYVPHEYIELIEIARNSTQDRILEMKVMEFFMKVYGYRGKHLGGSRKPDGAIYTVGSPIDYGVIVDTKAYSGGYNLPIGQADEMQRYVEENQTRNKHINPNEWWKVYPSSVTEFKFLFVSGHFKGNYKAQLTRLNHITNCNGAVLSVEELLIGGEMIKAGTLTLEEVRRKFNNGEINFSGSETPGTSESATPESMEKKYSIGLAIGTNSVGWAVITDDYKVPSKKFKVLGNTNRKSIKKNLMGALLFDSGETAEATRLKRTARRRYTRRKNRIRYLQEIFANEMAKLDDSFFQRLEESFLVEEDKKNERHPIFGNLADEVAYHRNYPTIYHLRKKLADSPEKADLRLIYLALAHIIKFRGHFLIEGKLNAENSDVAKLFYQLIQTYNQLFEESPLDEIEVDAKGILSARLSKSKRLEKLIAVFPNEKKNGLFGNIIALALGLTPNFKSNFDLTEDAKLQLSKDTYDDDLDELLGQIGDQYADLFSAAKNLSDAILLSDILRSNSEVTKAPLSASMVKRYDEHHQDLALLKTLVRQQFPEKYAEIFKDDTKNGYAGYVGIGIKHRKRTTKLATQEEFYKFIKPILEKMDGAEELLAKLNRDDLLRKQRTFDNGSIPHQIHLKELHAILRRQEEFYPFLKENREKIEKILTFRIPYYVGPLARGNSRFAWLTRKSEEAITPWNFEEVVDKGASAQSFIERMTNFDEQLPNKKVLPKHSLLYEYFTVYNELTKVKYVTERMRKPEFLSGEQKKAIVDLLFKTNRKVTVKQLKEDYFKKIECFDSVEIIGVEDRFNASLGTYHDLLKIIKDKDFLDNEENEDILEDIVLTLTLFEDREMIEERLKTYAHLFDDKVMKQLKRRHYTGWGRLSRKMINGIRDKQSGKTILDFLKSDGFSNRNFMQLIHDDSLTFKEEIEKAQVSGQGDSLHEQIADLAGSPAIKKGILQTVKIVDELVKVMGHKPENIVIEMARENQTTTKGLQQSRERKKRGGSGGLSEADKAGFIKRQLVETRQITKHVARILDSRMNTKRDKNDKPIREVKVITLKSKLVSDFRKDFQLYKVRDINNYHHAHDAYLNAVVGTALIKKYPKLESEFVYGGEVVWNKEKDFATVRKVLAMPQVNIVKKTEVQTGGFSKESILSKRESAKLIPRKKGWDTRKYGGFGSPTVAYSILVVAKVEKGKAKKLKSVKVLVGITIMEKGSYEKDPIGFLEAKGYKDIKKELIFKLPKYSLFELENGRRRMLASATELQKANELVLPQHLVRLLYYTQNISATTGSNNLGYIEQHREEFKEIFEKIIDFSEKYILKNKVNSNLKSSFDEQFAVSDSILLSNSFVSLLKYTSFGASGGFTFLDLDVKQGRLRYQTVTEVLDATLIYQSITGLYETRTDLSQLGGD

SEQ ID NO: 16 - protein, 1468 aa, Artificial Sequence
  dScCas9-FokI.dREC2.dFLEX
  misc_feature: synthetic
MAPKKKRKVGGSGSQLVKSELEEKKSELRHKLKYVPHEYIELIEIARNSTQDRILEMKVMEFFMKVYGYRGKHLGGSRKPDGAIYTVGSPIDYGVIVDTKAYSGGYNLPIGQADEMQRYVEENQTRNKHINPNEWWKVYPSSVTEFKFLFVSGHFKGNYKAQLTRLNHITNCNGAVLSVEELLIGGEMIKAGTLTLEEVRRKFNNGEINFSGSETPGTSESATPESMEKKYSIGLAIGTNSVGWAVITDDYKVPSKKFKVLGNTNRKSIKKNLMGALLFDSGETAEATRLKRTARRRYTRRKNRIRYLQEIFANEMAKLDDSFFQRLEESFLVEEDKKNERHPIFGNLADEVAYHRNYPTIYHLRKKLADSPEKADLRLIYLALAHIIKFRGHFLIEGKLSNSEVTKAPLSASMVKRYDEHHQDLALLKTLVRQQFPEKYAEIFKDDTKNGYAGYVGIGIKHRKRTTKLATQEEFYKFIKPILEKMDGAEELLAKLNRDDLLRKQRTFDNGSIPHQIHLKELHAILRRQEEFYPFLKENREKIEKILTFRIPYYVGPLARGNSRFAWLTRKSEEAITPWNFEEVVDKGASAQSFIERMTNFDEQLPNKKVLPKHSLLYEYFTVYNELTKVKYVTERMRKPEFLSGEQKKAIVDLLFKTNRKVTVKQLKEDYFKKIECFDSVEIIGVEDRFNASLGTYHDLLKIIKDKDFLDNEENEDILEDIVLTLTLFEDREMIEERLKTYAHLFDDKVMKQLKRRHYTGWGRLSRKMINGIRDKQSGKTILDFLKSDGFSNRNFMQLIHDDSLTFKEEIEKAQVSGQGDSLHEQIADLAGSPAIKKGILQTVKIVDELVKVMGHKPENIVIEMARENQTTTKGLQQSRERKKRIEEGIKELESQILKENPVENTQLQNEKLYLYYLQNGRDMYVDQELDINRLSDYDVDAIVPQSFIKDDSIDNKVLTRSVENRGKSDNVPSEEVVKKMKNYWRQLLNAKLITQRKFDNLTKAERGGLSEADKAGFIKRQLVETRQITKHVARILDSRMNTKRDKNDKPIREVKVITLKSKLVSDFRKDFQLYKVRDINNYHHAHDAYLNAVVGTALIKKYPKLESEFVYGDYKVYDVRKMIAKSEQEIGKATAKRFFYSNIMNFFKTEVKLANGEIRKRPLIETNGETGEVVWNKEKDFATVRKVLAMPQVNIVKKTEVQTGGFSKESILSKRESAKLIPRKKGWDTRKYGGFGSPTVAYSILVVAKVEKGKAKKLKSVKVLVGITIMEKGSYEKDPIGFLEAKGYKDIKKELIFKLPKYSLFELENGRRRMLASATELQKANELVLPQHLVRLLYYTQNISATTGSNNLGYIEQHREEFKEIFEKIIDFSEKYILKNKVNSNLKSSFDEQFAVSDSILLSNSFVSLLKYTSFGASGGFTFLDLDVKQGRLRYQTVTEVLDATLIYQSITGLYETRTDLSQLGGD

SEQ ID NO: 17 - protein, 1295 aa, Artificial Sequence
  dScCas9-FokI.dHNH.dREC2.dFLEX
  misc_feature: synthetic
MAPKKKRKVGGSGSQLVKSELEEKKSELRHKLKYVPHEYIELIEIARNSTQDRILEMKVMEFFMKVYGYRGKHLGGSRKPDGAIYTVGSPIDYGVIVDTKAYSGGYNLPIGQADEMQRYVEENQTRNKHINPNEWWKVYPSSVTEFKFLFVSGHFKGNYKAQLTRLNHITNCNGAVLSVEELLIGGEMIKAGTLTLEEVRRKFNNGEINFSGSETPGTSESATPESMEKKYSIGLAIGTNSVGWAVITDDYKVPSKKFKVLGNTNRKSIKKNLMGALLFDSGETAEATRLKRTARRRYTRRKNRIRYLQEIFANEMAKLDDSFFQRLEESFLVEEDKKNERHPIFGNLADEVAYHRNYPTIYHLRKKLADSPEKADLRLIYLALAHIIKFRGHFLIEGKLGGSGSNSEVTKAPLSASMVKRYDEHHQDLALLKTLVRQQFPEKYAEIFKDDTKNGYAGYVGIGIKHRKRTTKLATQEEFYKFIKPILEKMDGAEELLAKLNRDDLLRKQRTFDNGSIPHQIHLKELHAILRRQEEFYPFLKENREKIEKILTFRIPYYVGPLARGNSRFAWLTRKSEEAITPWNFEEVVDKGASAQSFIERMTNFDEQLPNKKVLPKHSLLYEYFTVYNELTKVKYVTERMRKPEFLSGEQKKAIVDLLFKTNRKVTVKQLKEDYFKKIECFDSVEIIGVEDRFNASLGTYHDLLKIIKDKDFLDNEENEDILEDIVLTLTLFEDREMIEERLKTYAHLFDDKVMKQLKRRHYTGWGRLSRKMINGIRDKQSGKTILDFLKSDGFSNRNFMQLIHDDSLTFKEEIEKAQVSGQGDSLHEQIADLAGSPAIKKGILQTVKIVDELVKVMGHKPENIVIEMARENQTTTKGLQQSRERKKRGGSGGLSEADKAGFIKRQLVETRQITKHVARILDSRMNTKRDKNDKPIREVKVITLKSKLVSDFRKDFQLYKVRDINNYHHAHDAYLNAVVGTALIKKYPKLESEFVYGGEVVWNKEKDFATVRKVLAMPQVNIVKKTEVQTGGFSKESILSKRESAKLIPRKKGWDTRKYGGFGSPTVAYSILVVAKVEKGKAKKLKSVKVLVGITIMEKGSYEKDPIGFLEAKGYKDIKKELIFKLPKYSLFELENGRRRMLASATELQKANELVLPQHLVRLLYYTQNISATTGSNNLGYIEQHREEFKEIFEKIIDFSEKYILKNKVNSNLKSSFDEQFAVSDSILLSNSFVSLLKYTSFGASGGFTFLDLDVKQGRLRYQTVTEVLDATLIYQSITGLYETRTDLSQLGGD

SEQ ID NO: 18 - DNA, 16 bp, Artificial Sequence
  3042-EMX1-T1-ddPCR-F1
  misc_feature: synthetic
gaaaccatgcccattc

SEQ ID NO: 19 - DNA, 17 bp, Artificial Sequence
  3049-EMX1-T1-ddPCR-R2
  misc_feature: synthetic
agagaagggtggttttc

SEQ ID NO: 20 - DNA, 20 bp, Artificial Sequence
  3088-EMX1-T1-TGEE3-reference probe
  misc_feature: synthetic
  misc_feature (9)..(9): g is modified with ZEN
ctctgtatggaaaagagcat

SEQ ID NO: 21 - DNA, 17 bp, Artificial Sequence
  3089-EMX1-T1-TGEE3-drop off probe
  misc_feature: synthetic
  misc_feature (8)..(8): g is a locked nucleic acid
  misc_feature (9)..(9): t is a locked nucleic acid
tcgtagagtcccatgtc

SEQ ID NO: 22 - DNA, 16 bp, Artificial Sequence
  3175-EMX1-T1-TGEE4-drop off probe
  misc_feature: synthetic
  misc_feature (9)..(9): c is a locked nucleic acid
  misc_feature (10)..(10): g is a locked nucleic acid
atgtctgccggcttcc

SEQ ID NO: 23 - DNA, 3027 bp, Artificial Sequence
  Plasmid 10917
  misc_feature: synthetic
ctaaattgtaagcgttaatattttgttaaaattcgcgttaaatttttgttaaatcagctcattttttaaccaataggccgaaatcggcaaaatcccttataaatcaaaagaatagaccgagatagggttgagtggccgctacagggcgctcccattcgccattcaggctgcgcaactgttgggaagggcgtttcggtgcgggcctcttcgctattacgccagctggcgaaagggggatgtgctgcaaggcgattaagttgggtaacgccagggttttcccagtcacgacgttgtaaaacgacggccagtgagcgcgacgtaatacgactcactatagggcgaattgaaggaaggccgtcaaggccgcataccggttggacaaacccacaactacgcgtaaaaaaaaagcaccgactcggtgccactttttcaagttgataacggactagccttattttaacttgctatttctagctctaaaactagaaactcgtagagtcccaggtgtttcgtggtctcatacagaacttataagattcccaaatccaaagacatttcacgtttatggtgatttcccagaacacatagcgacatgcaaatattgcagggcgccactcccctgtccctcacagccatcttcctgccagggcgcacgcgcgctgggtgttcccgcctagtgacactgggcccgcgattccttggagcgggttgatgacgtcagcgttcaaagagggcctatttcccatgattccttcatatttgcatatacgatacaaggctgttagagagataattggaattaatttgactgtaaacacaaagatattagtacaaaatacgtgacgtagaaagtaataatttcttgggtagtttgcagttttaaaattatgttttaaaatggactatcatatgcttaccgtaacttgaaagtatttcgatttcttggctttatatatcttgtggaaaggacgaaacaccagagcctgcactcctccaccgttttagagctagaaatagcaagttaaaataaggctagtccgttatcaacttgaaaaagtggcaccgagtcggtgctttttttacgcgtacttgcggccgcatattcctaggataccggtctgggcctcatgggccttcctttcactgcccgctttccagtcgggaaacctgtcgtgccagctgcattaacatggtcatagctgtttccttgcgtattgggcgctctccgcttcctcgctcactgactcgctgcgctcggtcgttcgggtaaagcctggggtgcctaatgagcaaaaggccagcaaaaggccaggaaccgtaaaaaggccgcgttgctggcgtttttccataggctccgcccccctgacgagcatcacaaaaatcgacgctcaagtcagaggtggcgaaacccgacaggactataaagataccaggcgtttccccctggaagctccctcgtgcgctctcctgttccgaccctgccgcttaccggatacctgtccgcctttctcccttcgggaagcgtggcgctttctcatagctcacgctgtaggtatctcagttcggtgtaggtcgttcgctccaagctgggctgtgtgcacgaaccccccgttcagcccgaccgctgcgccttatccggtaactatcgtcttgagtccaacccggtaagacacgacttatcgccactggcagcagccactggtaacaggattagcagagcgaggtatgtaggcggtgctacagagttcttgaagtggtggcctaactacggctacactagaagaacagtatttggtatctgcgctctgctgaagccagttaccttcggaaaaagagttggtagctcttgatccggcaaacaaaccaccgctggtagcggtggtttttttgtttgcaagcagcagattacgcgcagaaaaaaaggatctcaagaagatcctttgatcttttctacggggtctgacgctcagtggaacgaaaactcacgttaagggattttggtcatgagattatcaaaaaggatcttcacctagatccttttaaattaaaaatgaagttttaaatcaatctaaagtatatatgagtaaacttggtctgacagttattagaaaaattcatccagcagacgataaaacgcaatacgctggctatccggtgccgcaatgccatacagcaccagaaaacgatccgcccattcgccgcccagttcttccgcaatatcacgggtggccagcgcaatatcctgataacgatccgccacgcccagacggccgcaatcaataaagccgctaaaacggccattttccaccataatgttcggcaggcacgcatcaccatgggtcaccaccagatcttcgccatccggcatgctcgctttcagacgcgcaaacagctctgccggtgccaggccctgatgttcttcatccagatcatcctgatccaccaggcccgcttccatacgggtacgcgcacgttcaatacgatgtttcgcctgatgatcaaacggacaggtcgccgggtccagggtatgcagacgacgcatggcatccgccataatgctcactttttctgccggcgccagatggctagacagcagatcctgacccggcacttcgcccagcagcagccaatcacggcccgcttcggtcaccacatccagcaccgccgcacacggaacaccggtggtggccagccagctcagacgcgccgcttcatcctgcagctcgttcagcgcaccgctcagatcggttttcacaaacagcaccggacgaccctgcgcgctcagacgaaacaccgccgcatcagagcagccaatggtctgctgcgcccaatcatagccaaacagacgttccacccacgctgccgggctacccgcatgcaggccatcctgttcaatcatactcttcctttttcaatattattgaagcatttatcagggttattgtctcatgagcggatacatatttgaatgtatttagaaaaataaacaaataggggttccgcgcacatttccccgaaaagtgccac

SEQ ID NO: 24 - protein, 1537 aa, Artificial Sequence
  dScCas9-FokI-ZF1
  misc_feature: synthetic
MAPKKKRKVGGSGSQLVKSELEEKKSELRHKLKYVPHEYIELIEIARNSTQDRILEMKVMEFFMKVYGYRGKHLGGSRKPDGAIYTVGSPIDYGVIVDTKAYSGGYNLPIGQADEMQRYVEENQTRNKHINPNEWWKVYPSSVTEFKFLFVSGHFKGNYKAQLTRLNHITNCNGAVLSVEELLIGGEMIKAGTLTLEEVRRKFNNGEINFSGSETPGTSESATPESEKKYSIGLAIGTNSVGWAVITDDYKVPSKKFKVLGNTNRKSIKKNLMGALLFDSGETAEATRLKRTARRRYTRRKNRIRYLQEIFANEMAKLDDSFFQRLEESFLVEEDKKNERHPIFGNLADEVAYHRNYPTIYHLRKKLADSPEKADLRLIYLALAHIIKFRGHFLIEGKLNAENSDVAKLFYQLIQTYNQLFEESPLDEIEVDAKGILSARLSKSKRLEKLIAVFPNEKKNGLFGNIIALALGLTPNFKSNFDLTEDAKLQLSKDTYDDDLDELLGQIGDQYADLFSAAKNLSDAILLSDILRSNSEVTKAPLSMVKRYDEHHQDLALLKTLVRQQFPEKYAEIFKDDTKNGYAGYVGIGIKHRKRTTKLATQEEFYKFIKPILEKMDGAEELLAKLNRDDLLRKQRTFDNGSIPHQIHLKELHAILRRQEEFYPFLKENREKIEKILTFRIPYYVGPLARGNSRFAWLTRKSEEAITPWNFEEVVDKGAQSFIERMTNFDEQLPNKKVLPKHSLLYEYFTVYNELTKVKYVTERMRKPEFLSGEQKKAIVDLLFKTNRKVTVKQLKEDYFKKIECFDSVEIIGVEDRFNASLGTYHDLLKIIKDKDFLDNEENEDILEDIVLTLTLFEDREMIEERLKTYAHLFDDKVMKQLKRRHYTGWGRLSRKMINGIRDKQSGKTILDFLKSDGFSNRNFMQLIHDDSLTFKEEIEKAQVSGQGDSLHEQIADLAPAIKKGILQTVKIVDELVKVMGHKPENIVIEMARENQTTTKGLQQSRERKKRIEEGIKELESQILKENPVENTQLQNEKLYLYYLQNGRDMYVDQELDINRLSDYDVDAIVPQSFIKDDSIDNKVLTRSVENRGKSDNVPSEEVVKKMKNYWRQLLNAKLITQRKFDNLTKAERGGLSEADKAGFIKRQLVETRQITKHVARILDSRMNTKRDKNDKPIREVKVITLKSKLVSDFRKDFQLYKVRDINNYHHAHDAYLNAVVGTALIKKYPKLESEFVYGDYKVYDVRKMIAKSEQEIGKATAKRFFYSNIMNFFKTEVKLANGEIRKRPLIETNGETGEVVWNKEKDFVRKVLAMPQVNIVKKTEVQTGGFSKESILSKRESAKLIPRKKGWDTRKYGGFGSPTVAYSILVVAKVEKGKAKKLKSVKVLVGITIMEKGSYEKDPIGFLEAKGYKDIKKELIFKLPKYSLFELENGRRRMLASATELQKAGGSAGGTGGSAPYRCPCRAGCPSLASMQAHMRGHSGGSGYQTVTEVLDATLIYQSITGLYETRTDLSQLGGDKRPAATKKAGQAKKKK

SEQ ID NO: 25 - protein, 1630 aa, Artificial Sequence
  dScCas9-FokI-ZF2
  misc_feature: synthetic
MAPKKKRKVGGSGSQLVKSELEEKKSELRHKLKYVPHEYIELIEIARNSTQDRILEMKVMEFFMKVYGYRGKHLGGSRKPDGAIYTVGSPIDYGVIVDTKAYSGGYNLPIGQADEMQRYVEENQTRNKHINPNEWWKVYPSSVTEFKFLFVSGHFKGNYKAQLTRLNHITNCNGAVLSVEELLIGGEMIKAGTLTLEEVRRKFNNGEINFSGSETPGTSESATPESEKKYSIGLAIGTNSVGWAVITDDYKVPSKKFKVLGNTNRKSIKKNLMGALLFDSGETAEATRLKRTARRRYTRRKNRIRYLQEIFANEMAKLDDSFFQRLEESFLVEEDKKNERHPIFGNLADEVAYHRNYPTIYHLRKKLADSPEKADLRLIYLALAHIIKFRGHFLIEGKLNAENSDVAKLFYQLIQTYNQLFEESPLDEIEVDAKGILSARLSKSKRLEKLIAVFPNEKKNGLFGNIIALALGLTPNFKSNFDLTEDAKLQLSKDTYDDDLDELLGQIGDQYADLFSAAKNLSDAILLSDILRSNSEVTKAPLSMVKRYDEHHQDLALLKTLVRQQFPEKYAEIFKDDTKNGYAGYVGIGIKHRKRTTKLATQEEFYKFIKPILEKMDGAEELLAKLNRDDLLRKQRTFDNGSIPHQIHLKELHAILRRQEEFYPFLKENREKIEKILTFRIPYYVGPLARGNSRFAWLTRKSEEAITPWNFEEVVDKGAQSFIERMTNFDEQLPNKKVLPKHSLLYEYFTVYNELTKVKYVTERMRKPEFLSGEQKKAIVDLLFKTNRKVTVKQLKEDYFKKIECFDSVEIIGVEDRFNASLGTYHDLLKIIKDKDFLDNEENEDILEDIVLTLTLFEDREMIEERLKTYAHLFDDKVMKQLKRRHYTGWGRLSRKMINGIRDKQSGKTILDFLKSDGFSNRNFMQLIHDDSLTFKEEIEKAQVSGQGDSLHEQIADLAPAIKKGILQTVKIVDELVKVMGHKPENIVIEMARENQTTTKGLQQSRERKKRIEEGIKELESQILKENPVENTQLQNEKLYLYYLQNGRDMYVDQELDINRLSDYDVDAIVPQSFIKDDSIDNKVLTRSVENRGKSDNVPSEEVVKKMKNYWRQLLNAKLITQRKFDNLTKAERGGLSEADKAGFIKRQLVETRQITKHVARILDSRMNTKRDKNDKPIREVKVITLKSKLVSDFRKDFQLYKVRDINNYHHAHDAYLNAVVGTALIKKYPKLESEFVYGDYKVYDVRKMIAKSEQEIGKATAKRFFYSNIMNFFKTEVKLANGEIRKRPLIETNGETGEVVWNKEKDFVRKVLAMPQVNIVKKTEVQTGGFSKESILSKRESAKLIPRKKGWDTRKYGGFGSPTVAYSILVVAKVEKGKAKKLKSVKVLVGITIMEKGSYEKDPIGFLEAKGYKDIKKELIFKLPKYSLFELENGRRRMLASATELQKANELVLPQHLVRLLYYTQNISATTGSNNLGYIEQHREEFKEIFEKIIDFSEKYILKNKVNSNLKSSFDEQFAVSDSILLSNSFVSLLKYTSFGAGGSAGGTGGSAPYRCPCRAGCPSLASMQAHMRGHSGGSGYQTVTEVLDATLIYQSITGLYETRTDLSQLGGDKRPAATKKAGQAKKKK

SEQ ID NO: 26 - protein, 1542 aa, Artificial Sequence
  dScCas9-FokI-ZF3
  misc_feature: synthetic
MAPKKKRKVGGSGSQLVKSELEEKKSELRHKLKYVPHEYIELIEIARNSTQDRILEMKVMEFFMKVYGYRGKHLGGSRKPDGAIYTVGSPIDYGVIVDTKAYSGGYNLPIGQADEMQRYVEENQTRNKHINPNEWWKVYPSSVTEFKFLFVSGHFKGNYKAQLTRLNHITNCNGAVLSVEELLIGGEMIKAGTLTLEEVRRKFNNGEINFSGSETPGTSESATPESEKKYSIGLAIGTNSVGWAVITDDYKVPSKKFKVLGNTNRKSIKKNLMGALLFDSGETAEATRLKRTARRRYTRRKNRIRYLQEIFANEMAKLDDSFFQRLEESFLVEEDKKNERHPIFGNLADEVAYHRNYPTIYHLRKKLADSPEKADLRLIYLALAHIIKFRGHFLIEGKLNAENSDVAKLFYQLIQTYNQLFEESPLDEIEVDAKGILSARLSKSKRLEKLIAVFPNEKKNGLFGNIIALALGLTPNFKSNFDLTEDAKLQLSKDTYDDDLDELLGQIGDQYADLFSAAKNLSDAILLSDILRSNSEVTKAPLSMVKRYDEHHQDLALLKTLVRQQFPEKYAEIFKDDTKNGYAGYVGIGIKHRKRTTKLATQEEFYKFIKPILEKMDGAEELLAKLNRDDLLRKQRTFDNGSIPHQIHLKELHAILRRQEEFYPFLKENREKIEKILTFRIPYYVGPLARGNSRFAWLTRKSEEAITPWNFEEVVDKGAQSFIERMTNFDEQLPNKKVLPKHSLLYEYFTVYNELTKVKYVTERMRKPEFLSGEQKKAIVDLLFKTNRKVTVKQLKEDYFKKIECFDSVEIIGVEDRFNASLGTYHDLLKIIKDKDFLDNEENEDILEDIVLTLTLFEDREMIEERLKTYAHLFDDKVMKQLKRRHYTGWGRLSRKMINGIRDKQSGKTILDFLKSDGFSNRNFMQLIHDDSLTFKEEIEKAQVSGQGDSLHEQIADLAPAIKKGILQTVKIVDELVKVMGHKPENIVIEMARENQTTTKGLQQSRERKKRIEEGIKELESQILKENPVENTQLQNEKLYLYYLQNGRDMYVDQELDINRLSDYDVDAIVPQSFIKDDSIDNKVLTRSVENRGKSDNVPSEEVVKKMKNYWRQLLNAKLITQRKFDNLTKAERGGLSEADKAGFIKRQLVETRQITKHVARILDSRMNTKRDKNDKPIREVKVITLKSKLVSDFRKDFQLYKVRDINNYHHAHDAYLNAVVGTALIKKYPKLESEFVYGDYKVYDVRKMIAKSEQEIGKATAKRFFYSNIMNFFKTEVKLANGEIRKRPLIETNGETGEVVWNKEKDFVRKVLAMPQVNIVKKTEVQTGGFSKESILSKRESAKLIPRKKGWDTRKYGGFGSPTVAYSILVVAKVEKGKAKKLKSVKVLVGITIMEKGSYEKDPIGFLEAKGYKDIKKELIFKLPKYSLFELENGRRRMLASATELQKAGGSAGGTGGSAGGSGAPYRCPCRAGCPSLASMQAHMRGHSGGSGYQTVTEVLDATLIYQSITGLYETRTDLSQLGGDKRPAATKKAGQAKKKK

SEQ ID NO: 27 - protein, 1635 aa, Artificial Sequence
  dScCas9-FokI-ZF4
  misc_feature: synthetic
MAPKKKRKVGGSGSQLVKSELEEKKSELRHKLKYVPHEYIELIEIARNSTQDRILEMKVMEFFMKVYGYRGKHLGGSRKPDGAIYTVGSPIDYGVIVDTKAYSGGYNLPIGQADEMQRYVEENQTRNKHINPNEWWKVYPSSVTEFKFLFVSGHFKGNYKAQLTRLNHITNCNGAVLSVEELLIGGEMIKAGTLTLEEVRRKFNNGEINFSGSETPGTSESATPESEKKYSIGLAIGTNSVGWAVITDDYKVPSKKFKVLGNTNRKSIKKNLMGALLFDSGETAEATRLKRTARRRYTRRKNRIRYLQEIFANEMAKLDDSFFQRLEESFLVEEDKKNERHPIFGNLADEVAYHRNYPTIYHLRKKLADSPEKADLRLIYLALAHIIKFRGHFLIEGKLNAENSDVAKLFYQLIQTYNQLFEESPLDEIEVDAKGILSARLSKSKRLEKLIAVFPNEKKNGLFGNIIALALGLTPNFKSNFDLTEDAKLQLSKDTYDDDLDELLGQIGDQYADLFSAAKNLSDAILLSDILRSNSEVTKAPLSMVKRYDEHHQDLALLKTLVRQQFPEKYAEIFKDDTKNGYAGYVGIGIKHRKRTTKLATQEEFYKFIKPILEKMDGAEELLAKLNRDDLLRKQRTFDNGSIPHQIHLKELHAILRRQEEFYPFLKENREKIEKILTFRIPYYVGPLARGNSRFAWLTRKSEEAITPWNFEEVVDKGAQSFIERMTNFDEQLPNKKVLPKHSLLYEYFTVYNELTKVKYVTERMRKPEFLSGEQKKAIVDLLFKTNRKVTVKQLKEDYFKKIECFDSVEIIGVEDRFNASLGTYHDLLKIIKDKDFLDNEENEDILEDIVLTLTLFEDREMIEERLKTYAHLFDDKVMKQLKRRHYTGWGRLSRKMINGIRDKQSGKTILDFLKSDGFSNRNFMQLIHDDSLTFKEEIEKAQVSGQGDSLHEQIADLAPAIKKGILQTVKIVDELVKVMGHKPENIVIEMARENQTTTKGLQQSRERKKRIEEGIKELESQILKENPVENTQLQNEKLYLYYLQNGRDMYVDQELDINRLSDYDVDAIVPQSFIKDDSIDNKVLTRSVENRGKSDNVPSEEVVKKMKNYWRQLLNAKLITQRKFDNLTKAERGGLSEADKAGFIKRQLVETRQITKHVARILDSRMNTKRDKNDKPIREVKVITLKSKLVSDFRKDFQLYKVRDINNYHHAHDAYLNAVVGTALIKKYPKLESEFVYGDYKVYDVRKMIAKSEQEIGKATAKRFFYSNIMNFFKTEVKLANGEIRKRPLIETNGETGEVVWNKEKDFVRKVLAMPQVNIVKKTEVQTGGFSKESILSKRESAKLIPRKKGWDTRKYGGFGSPTVAYSILVVAKVEKGKAKKLKSVKVLVGITIMEKGSYEKDPIGFLEAKGYKDIKKELIFKLPKYSLFELENGRRRMLASATELQKANELVLPQHLVRLLYYTQNISATTGSNNLGYIEQHREEFKEIFEKIIDFSEKYILKNKVNSNLKSSFDEQFAVSDSILLSNSFVSLLKYTSFGAGGSAGGTGGSAGGSGAPYRCPCRAGCPSLASMQAHMRGHSGGSGYQTVTEVLDATLIYQSITGLYETRTDLSQLGGDKRPAATKKAGQAKKKK

SEQ ID NO: 28 - protein, 1552 aa, Artificial Sequence
  dScCas9-FokI-LAC
  misc_feature: synthetic
MAPKKKRKVGGSGSQLVKSELEEKKSELRHKLKYVPHEYIELIEIARNSTQDRILEMKVMEFFMKVYGYRGKHLGGSRKPDGAIYTVGSPIDYGVIVDTKAYSGGYNLPIGQADEMQRYVEENQTRNKHINPNEWWKVYPSSVTEFKFLFVSGHFKGNYKAQLTRLNHITNCNGAVLSVEELLIGGEMIKAGTLTLEEVRRKFNNGEINFSGSETPGTSESATPESEKKYSIGLAIGTNSVGWAVITDDYKVPSKKFKVLGNTNRKSIKKNLMGALLFDSGETAEATRLKRTARRRYTRRKNRIRYLQEIFANEMAKLDDSFFQRLEESFLVEEDKKNERHPIFGNLADEVAYHRNYPTIYHLRKKLADSPEKADLRLIYLALAHIIKFRGHFLIEGKLNAENSDVAKLFYQLIQTYNQLFEESPLDEIEVDAKGILSARLSKSKRLEKLIAVFPNEKKNGLFGNIIALALGLTPNFKSNFDLTEDAKLQLSKDTYDDDLDELLGQIGDQYADLFSAAKNLSDAILLSDILRSNSEVTKAPLSMVKRYDEHHQDLALLKTLVRQQFPEKYAEIFKDDTKNGYAGYVGIGIKHRKRTTKLATQEEFYKFIKPILEKMDGAEELLAKLNRDDLLRKQRTFDNGSIPHQIHLKELHAILRRQEEFYPFLKENREKIEKILTFRIPYYVGPLARGNSRFAWLTRKSEEAITPWNFEEVVDKGAQSFIERMTNFDEQLPNKKVLPKHSLLYEYFTVYNELTKVKYVTERMRKPEFLSGEQKKAIVDLLFKTNRKVTVKQLKEDYFKKIECFDSVEIIGVEDRFNASLGTYHDLLKIIKDKDFLDNEENEDILEDIVLTLTLFEDREMIEERLKTYAHLFDDKVMKQLKRRHYTGWGRLSRKMINGIRDKQSGKTILDFLKSDGFSNRNFMQLIHDDSLTFKEEIEKAQVSGQGDSLHEQIADLAPAIKKGILQTVKIVDELVKVMGHKPENIVIEMARENQTTTKGLQQSRERKKRIEEGIKELESQILKENPVENTQLQNEKLYLYYLQNGRDMYVDQELDINRLSDYDVDAIVPQSFIKDDSIDNKVLTRSVENRGKSDNVPSEEVVKKMKNYWRQLLNAKLITQRKFDNLTKAERGGLSEADKAGFIKRQLVETRQITKHVARILDSRMNTKRDKNDKPIREVKVITLKSKLVSDFRKDFQLYKVRDINNYHHAHDAYLNAVVGTALIKKYPKLESEFVYGDYKVYDVRKMIAKSEQEIGKATAKRFFYSNIMNFFKTEVKLANGEIRKRPLIETNGETGEVVWNKEKDFVRKVLAMPQVNIVKKTEVQTGGFSKESILSKRESAKLIPRKKGWDTRKYGGFGSPTVAYSILVVAKVEKGKAKKLKSVKVLVGITIMEKGSYEKDPIGFLEAKGYKDIKKELIFKLPKYSLFELENGRRRMLASATELQKAGGSGMKPVTLYDVAEYAGVSYQTVSRVVNQASHVSAKTREKVEAAMAELNGGSGYQTVTEVLDATLIYQSITGLYETRTDLSQLGGDKRPAATKKAGQAKKKK

SEQ ID NO: 29 - protein, 1645 aa, Artificial Sequence
  dScCas9-FokI-LAC2
  misc_feature: synthetic
MAPKKKRKVGGSGSQLVKSELEEKKSELRHKLKYVPHEYIELIEIARNSTQDRILEMKVMEFFMKVYGYRGKHLGGSRKPDGAIYTVGSPIDYGVIVDTKAYSGGYNLPIGQADEMQRYVEENQTRNKHINPNEWWKVYPSSVTEFKFLFVSGHFKGNYKAQLTRLNHITNCNGAVLSVEELLIGGEMIKAGTLTLEEVRRKFNNGEINFSGSETPGTSESATPESEKKYSIGLAIGTNSVGWAVITDDYKVPSKKFKVLGNTNRKSIKKNLMGALLFDSGETAEATRLKRTARRRYTRRKNRIRYLQEIFANEMAKLDDSFFQRLEESFLVEEDKKNERHPIFGNLADEVAYHRNYPTIYHLRKKLADSPEKADLRLIYLALAHIIKFRGHFLIEGKLNAENSDVAKLFYQLIQTYNQLFEESPLDEIEVDAKGILSARLSKSKRLEKLIAVFPNEKKNGLFGNIIALALGLTPNFKSNFDLTEDAKLQLSKDTYDDDLDELLGQIGDQYADLFSAAKNLSDAILLSDILRSNSEVTKAPLSMVKRYDEHHQDLALLKTLVRQQFPEKYAEIFKDDTKNGYAGYVGIGIKHRKRTTKLATQEEFYKFIKPILEKMDGAEELLAKLNRDDLLRKQRTFDNGSIPHQIHLKELHAILRRQEEFYPFLKENREKIEKILTFRIPYYVGPLARGNSRFAWLTRKSEEAITPWNFEEVVDKGAQSFIERMTNFDEQLPNKKVLPKHSLLYEYFTVYNELTKVKYVTERMRKPEFLSGEQKKAIVDLLFKTNRKVTVKQLKEDYFKKIECFDSVEIIGVEDRFNASLGTYHDLLKIIKDKDFLDNEENEDILEDIVLTLTLFEDREMIEERLKTYAHLFDDKVMKQLKRRHYTGWGRLSRKMINGIRDKQSGKTILDFLKSDGFSNRNFMQLIHDDSLTFKEEIEKAQVSGQGDSLHEQIADLAPAIKKGILQTVKIVDELVKVMGHKPENIVIEMARENQTTTKGLQQSRERKKRIEEGIKELESQILKENPVENTQLQNEKLYLYYLQNGRDMYVDQELDINRLSDYDVDAIVPQSFIKDDSIDNKVLTRSVENRGKSDNVPSEEVVKKMKNYWRQLLNAKLITQRKFDNLTKAERGGLSEADKAGFIKRQLVETRQITKHVARILDSRMNTKRDKNDKPIREVKVITLKSKLVSDFRKDFQLYKVRDINNYHHAHDAYLNAVVGTALIKKYPKLESEFVYGDYKVYDVRKMIAKSEQEIGKATAKRFFYSNIMNFFKTEVKLANGEIRKRPLIETNGETGEVVWNKEKDFVRKVLAMPQVNIVKKTEVQTGGFSKESILSKRESAKLIPRKKGWDTRKYGGFGSPTVAYSILVVAKVEKGKAKKLKSVKVLVGITIMEKGSYEKDPIGFLEAKGYKDIKKELIFKLPKYSLFELENGRRRMLASATELQKANELVLPQHLVRLLYYTQNISATTGSNNLGYIEQHREEFKEIFEKIIDFSEKYILKNKVNSNLKSSFDEQFAVSDSILLSNSFVSLLKYTSFGAGGSGMKPVTLYDVAEYAGVSYQTVSRVVNQASHVSAKTREKVEAAMAELNGGSGYQTVTEVLDATLIYQSITGLYETRTDLSQLGGDKRPAATKKAGQAKKKK

SEQ ID NO: 30 - protein, 1564 aa, Artificial Sequence
  dScCas9-FokI-LAC3
  misc_feature: synthetic
MAPKKKRKVGGSGSQLVKSELEEKKSELRHKLKYVPHEYIELIEIARNSTQDRILEMKVMEFFMKVYGYRGKHLGGSRKPDGAIYTVGSPIDYGVIVDTKAYSGGYNLPIGQADEMQRYVEENQTRNKHINPNEWWKVYPSSVTEFKFLFVSGHFKGNYKAQLTRLNHITNCNGAVLSVEELLIGGEMIKAGTLTLEEVRRKFNNGEINFSGSETPGTSESATPESEKKYSIGLAIGTNSVGWAVITDDYKVPSKKFKVLGNTNRKSIKKNLMGALLFDSGETAEATRLKRTARRRYTRRKNRIRYLQEIFANEMAKLDDSFFQRLEESFLVEEDKKNERHPIFGNLADEVAYHRNYPTIYHLRKKLADSPEKADLRLIYLALAHIIKFRGHFLIEGKLNAENSDVAKLFYQLIQTYNQLFEESPLDEIEVDAKGILSARLSKSKRLEKLIAVFPNEKKNGLFGNIIALALGLTPNFKSNFDLTEDAKLQLSKDTYDDDLDELLGQIGDQYADLFSAAKNLSDAILLSDILRSNSEVTKAPLSMVKRYDEHHQDLALLKTLVRQQFPEKYAEIFKDDTKNGYAGYVGIGIKHRKRTTKLATQEEFYKFIKPILEKMDGAEELLAKLNRDDLLRKQRTFDNGSIPHQIHLKELHAILRRQEEFYPFLKENREKIEKILTFRIPYYVGPLARGNSRFAWLTRKSEEAITPWNFEEVVDKGAQSFIERMTNFDEQLPNKKVLPKHSLLYEYFTVYNELTKVKYVTERMRKPEFLSGEQKKAIVDLLFKTNRKVTVKQLKEDYFKKIECFDSVEIIGVEDRFNASLGTYHDLLKIIKDKDFLDNEENEDILEDIVLTLTLFEDREMIEERLKTYAHLFDDKVMKQLKRRHYTGWGRLSRKMINGIRDKQSGKTILDFLKSDGFSNRNFMQLIHDDSLTFKEEIEKAQVSGQGDSLHEQIADLAPAIKKGILQTVKIVDELVKVMGHKPENIVIEMARENQTTTKGLQQSRERKKRIEEGIKELESQILKENPVENTQLQNEKLYLYYLQNGRDMYVDQELDINRLSDYDVDAIVPQSFIKDDSIDNKVLTRSVENRGKSDNVPSEEVVKKMKNYWRQLLNAKLITQRKFDNLTKAERGGLSEADKAGFIKRQLVETRQITKHVARILDSRMNTKRDKNDKPIREVKVITLKSKLVSDFRKDFQLYKVRDINNYHHAHDAYLNAVVGTALIKKYPKLESEFVYGDYKVYDVRKMIAKSEQEIGKATAKRFFYSNIMNFFKTEVKLANGEIRKRPLIETNGETGEVVWNKEKDFVRKVLAMPQVNIVKKTEVQTGGFSKESILSKRESAKLIPRKKGWDTRKYGGFGSPTVAYSILVVAKVEKGKAKKLKSVKVLVGITIMEKGSYEKDPIGFLEAKGYKDIKKELIFKLPKYSLFELENGRRRMLASATELQKAGGSAGGTGGSMKPVTLYDVAEYAGVSYQTVSRVVNQASHVSAKTREKVEAAMAELNGGSAGGTGGSYQTVTEVLDATLIYQSITGLYETRTDLSQLGGDKRPAATKKAGQAKKKK

SEQ ID NO: 31 - protein, 1657 aa, Artificial Sequence
  dScCas9-FokI-LAC4
  misc_feature: synthetic
MAPKKKRKVGGSGSQLVKSELEEKKSELRHKLKYVPHEYIELIEIARNSTQDRILEMKVMEFFMKVYGYRGKHLGGSRKPDGAIYTVGSPIDYGVIVDTKAYSGGYNLPIGQADEMQRYVEENQTRNKHINPNEWWKVYPSSVTEFKFLFVSGHFKGNYKAQLTRLNHITNCNGAVLSVEELLIGGEMIKAGTLTLEEVRRKFNNGEINFSGSETPGTSESATPESEKKYSIGLAIGTNSVGWAVITDDYKVPSKKFKVLGNTNRKSIKKNLMGALLFDSGETAEATRLKRTARRRYTRRKNRIRYLQEIFANEMAKLDDSFFQRLEESFLVEEDKKNERHPIFGNLADEVAYHRNYPTIYHLRKKLADSPEKADLRLIYLALAHIIKFRGHFLIEGKLNAENSDVAKLFYQLIQTYNQLFEESPLDEIEVDAKGILSARLSKSKRLEKLIAVFPNEKKNGLFGNIIALALGLTPNFKSNFDLTEDAKLQLSKDTYDDDLDELLGQIGDQYADLFSAAKNLSDAILLSDILRSNSEVTKAPLSMVKRYDEHHQDLALLKTLVRQQFPEKYAEIFKDDTKNGYAGYVGIGIKHRKRTTKLATQEEFYKFIKPILEKMDGAEELLAKLNRDDLLRKQRTFDNGSIPHQIHLKELHAILRRQEEFYPFLKENREKIEKILTFRIPYYVGPLARGNSRFAWLTRKSEEAITPWNFEEVVDKGAQSFIERMTNFDEQLPNKKVLPKHSLLYEYFTVYNELTKVKYVTERMRKPEFLSGEQKKAIVDLLFKTNRKVTVKQLKEDYFKKIECFDSVEIIGVEDRFNASLGTYHDLLKIIKDKDFLDNEENEDILEDIVLTLTLFEDREMIEERLKTYAHLFDDKVMKQLKRRHYTGWGRLSRKMINGIRDKQSGKTILDFLKSDGFSNRNFMQLIHDDSLTFKEEIEKAQVSGQGDSLHEQIADLAPAIKKGILQTVKIVDELVKVMGHKPENIVIEMARENQTTTKGLQQSRERKKRIEEGIKELESQILKENPVENTQLQNEKLYLYYLQNGRDMYVDQELDINRLSDYDVDAIVPQSFIKDDSIDNKVLTRSVENRGKSDNVPSEEVVKKMKNYWRQLLNAKLITQRKFDNLTKAERGGLSEADKAGFIKRQLVETRQITKHVARILDSRMNTKRDKNDKPIREVKVITLKSKLVSDFRKDFQLYKVRDINNYHHAHDAYLNAVVGTALIKKYPKLESEFVYGDYKVYDVRKMIAKSEQEIGKATAKRFFYSNIMNFFKTEVKLANGEIRKRPLIETNGETGEVVWNKEKDFVRKVLAMPQVNIVKKTEVQTGGFSKESILSKRESAKLIPRKKGWDTRKYGGFGSPTVAYSILVVAKVEKGKAKKLKSVKVLVGITIMEKGSYEKDPIGFLEAKGYKDIKKELIFKLPKYSLFELENGRRRMLASATELQKANELVLPQHLVRLLYYTQNISATTGSNNLGYIEQHREEFKEIFEKIIDFSEKYILKNKVNSNLKSSFDEQFAVSDSILLSNSFVSLLKYTSFGAGGSAGGTGGSMKPVTLYDVAEYAGVSYQTVSRVVNQASHVSAKTREKVEAAMAELNGGSAGGTGGSYQTVTEVLDATLIYQSITGLYETRTDLSQLGGDKRPAATKKAGQAKKKK

SEQ ID NO: 32 - protein, 1555 aa, Artificial Sequence
  dScCas9-FokI-HIVIN
  misc_feature: synthetic
MAPKKKRKVGGSGSQLVKSELEEKKSELRHKLKYVPHEYIELIEIARNSTQDRILEMKVMEFFMKVYGYRGKHLGGSRKPDGAIYTVGSPIDYGVIVDTKAYSGGYNLPIGQADEMQRYVEENQTRNKHINPNEWWKVYPSSVTEFKFLFVSGHFKGNYKAQLTRLNHITNCNGAVLSVEELLIGGEMIKAGTLTLEEVRRKFNNGEINFSGSETPGTSESATPESEKKYSIGLAIGTNSVGWAVITDDYKVPSKKFKVLGNTNRKSIKKNLMGALLFDSGETAEATRLKRTARRRYTRRKNRIRYLQEIFANEMAKLDDSFFQRLEESFLVEEDKKNERHPIFGNLADEVAYHRNYPTIYHLRKKLADSPEKADLRLIYLALAHIIKFRGHFLIEGKLNAENSDVAKLFYQLIQTYNQLFEESPLDEIEVDAKGILSARLSKSKRLEKLIAVFPNEKKNGLFGNIIALALGLTPNFKSNFDLTEDAKLQLSKDTYDDDLDELLGQIGDQYADLFSAAKNLSDAILLSDILRSNSEVTKAPLSMVKRYDEHHQDLALLKTLVRQQFPEKYAEIFKDDTKNGYAGYVGIGIKHRKRTTKLATQEEFYKFIKPILEKMDGAEELLAKLNRDDLLRKQRTFDNGSIPHQIHLKELHAILRRQEEFYPFLKENREKIEKILTFRIPYYVGPLARGNSRFAWLTRKSEEAITPWNFEEVVDKGAQSFIERMTNFDEQLPNKKVLPKHSLLYEYFTVYNELTKVKYVTERMRKPEFLSGEQKKAIVDLLFKTNRKVTVKQLKEDYFKKIECFDSVEIIGVEDRFNASLGTYHDLLKIIKDKDFLDNEENEDILEDIVLTLTLFEDREMIEERLKTYAHLFDDKVMKQLKRRHYTGWGRLSRKMINGIRDKQSGKTILDFLKSDGFSNRNFMQLIHDDSLTFKEEIEKAQVSGQGDSLHEQIADLAPAIKKGILQTVKIVDELVKVMGHKPENIVIEMARENQTTTKGLQQSRERKKRIEEGIKELESQILKENPVENTQLQNEKLYLYYLQNGRDMYVDQELDINRLSDYDVDAIVPQSFIKDDSIDNKVLTRSVENRGKSDNVPSEEVVKKMKNYWRQLLNAKLITQRKFDNLTKAERGGLSEADKAGFIKRQLVETRQITKHVARILDSRMNTKRDKNDKPIREVKVITLKSKLVSDFRKDFQLYKVRDINNYHHAHDAYLNAVVGTALIKKYPKLESEFVYGDYKVYDVRKMIAKSEQEIGKATAKRFFYSNIMNFFKTEVKLANGEIRKRPLIETNGETGEVVWNKEKDFVRKVLAMPQVNIVKKTEVQTGGFSKESILSKRESAKLIPRKKGWDTRKYGGFGSPTVAYSILVVAKVEKGKAKKLKSVKVLVGITIMEKGSYEKDPIGFLEAKGYKDIKKELIFKLPKYSLFELENGRRRMLASATELQKAGGSGIQNFRVYYRDSRNPLWKGPAKLLWKGEGAWIQDNSDIKWPRRKAKIIRDGGSGYQTVTEVLDATLIYQSITGLYETRTDLSQLGGDKRPAATKKAGQAKKKK

SEQ ID NO: 33 - protein, 1648 aa, Artificial Sequence
  dScCas9-FokI-HIVIN2
  misc_feature: synthetic
MAPKKKRKVGGSGSQLVKSELEEKKSELRHKLKYVPHEYIELIEIARNSTQDRILEMKVMEFFMKVYGYRGKHLGGSRKPDGAIYTVGSPIDYGVIVDTKAYSGGYNLPIGQADEMQRYVEENQTRNKHINPNEWWKVYPSSVTEFKFLFVSGHFKGNYKAQLTRLNHITNCNGAVLSVEELLIGGEMIKAGTLTLEEVRRKFNNGEINFSGSETPGTSESATPESEKKYSIGLAIGTNSVGWAVITDDYKVPSKKFKVLGNTNRKSIKKNLMGALLFDSGETAEATRLKRTARRRYTRRKNRIRYLQEIFANEMAKLDDSFFQRLEESFLVEEDKKNERHPIFGNLADEVAYHRNYPTIYHLRKKLADSPEKADLRLIYLALAHIIKFRGHFLIEGKLNAENSDVAKLFYQLIQTYNQLFEESPLDEIEVDAKGILSARLSKSKRLEKLIAVFPNEKKNGLFGNIIALALGLTPNFKSNFDLTEDAKLQLSKDTYDDDLDELLGQIGDQYADLFSAAKNLSDAILLSDILRSNSEVTKAPLSMVKRYDEHHQDLALLKTLVRQQFPEKYAEIFKDDTKNGYAGYVGIGIKHRKRTTKLATQEEFYKFIKPILEKMDGAEELLAKLNRDDLLRKQRTFDNGSIPHQIHLKELHAILRRQEEFYPFLKENREKIEKILTFRIPYYVGPLARGNSRFAWLTRKSEEAITPWNFEEVVDKGAQSFIERMTNFDEQLPNKKVLPKHSLLYEYFTVYNELTKVKYVTERMRKPEFLSGEQKKAIVDLLFKTNRKVTVKQLKEDYFKKIECFDSVEIIGVEDRFNASLGTYHDLLKIIKDKDFLDNEENEDILEDIVLTLTLFEDREMIEERLKTYAHLFDDKVMKQLKRRHYTGWGRLSRKMINGIRDKQSGKTILDFLKSDGFSNRNFMQLIHDDSLTFKEEIEKAQVSGQGDSLHEQIADLAPAIKKGILQTVKIVDELVKVMGHKPENIVIEMARENQTTTKGLQQSRERKKRIEEGIKELESQILKENPVENTQLQNEKLYLYYLQNGRDMYVDQELDINRLSDYDVDAIVPQSFIKDDSIDNKVLTRSVENRGKSDNVPSEEVVKKMKNYWRQLLNAKLITQRKFDNLTKAERGGLSEADKAGFIKRQLVETRQITKHVARILDSRMNTKRDKNDKPIREVKVITLKSKLVSDFRKDFQLYKVRDINNYHHAHDAYLNAVVGTALIKKYPKLESEFVYGDYKVYDVRKMIAKSEQEIGKATAKRFFYSNIMNFFKTEVKLANGEIRKRPLIETNGETGEVVWNKEKDFVRKVLAMPQVNIVKKTEVQTGGFSKESILSKRESAKLIPRKKGWDTRKYGGFGSPTVAYSILVVAKVEKGKAKKLKSVKVLVGITIMEKGSYEKDPIGFLEAKGYKDIKKELIFKLPKYSLFELENGRRRMLASATELQKANELVLPQHLVRLLYYTQNISATTGSNNLGYIEQHREEFKEIFEKIIDFSEKYILKNKVNSNLKSSFDEQFAVSDSILLSNSFVSLLKYTSFGAGGSGIQNFRVYYRDSRNPLWKGPAKLLWKGEGAWIQDNSDIKWPRRKAKIIRDGGSGYQTVTEVLDATLIYQSITGLYETRTDLSQLGGDKRPAATKKAGQAKKKK

SEQ ID NO: 34 - protein, 1567 aa, Artificial Sequence
  dScCas9-FokI-HIVIN3
  misc_feature: synthetic
MAPKKKRKVGGSGSQLVKSELEEKKSELRHKLKYVPHEYIELIEIARNSTQDRILEMKVMEFFMKVYGYRGKHLGGSRKPDGAIYTVGSPIDYGVIVDTKAYSGGYNLPIGQADEMQRYVEENQTRNKHINPNEWWKVYPSSVTEFKFLFVSGHFKGNYKAQLTRLNHITNCNGAVLSVEELLIGGEMIKAGTLTLEEVRRKFNNGEINFSGSETPGTSESATPESEKKYSIGLAIGTNSVGWAVITDDYKVPSKKFKVLGNTNRKSIKKNLMGALLFDSGETAEATRLKRTARRRYTRRKNRIRYLQEIFANEMAKLDDSFFQRLEESFLVEEDKKNERHPIFGNLADEVAYHRNYPTIYHLRKKLADSPEKADLRLIYLALAHIIKFRGHFLIEGKLNAENSDVAKLFYQLIQTYNQLFEESPLDEIEVDAKGILSARLSKSKRLEKLIAVFPNEKKNGLFGNIIALALGLTPNFKSNFDLTEDAKLQLSKDTYDDDLDELLGQIGDQYADLFSAAKNLSDAILLSDILRSNSEVTKAPLSMVKRYDEHHQDLALLKTLVRQQFPEKYAEIFKDDTKNGYAGYVGIGIKHRKRTTKLATQEEFYKFIKPILEKMDGAEELLAKLNRDDLLRKQRTFDNGSIPHQIHLKELHAILRRQEEFYPFLKENREKIEKILTFRIPYYVGPLARGNSRFAWLTRKSEEAITPWNFEEVVDKGAQSFIERMTNFDEQLPNKKVLPKHSLLYEYFTVYNELTKVKYVTERMRKPEFLSGEQKKAIVDLLFKTNRKVTVKQLKEDYFKKIECFDSVEIIGVEDRFNASLGTYHDLLKIIKDKDFLDNEENEDILEDIVLTLTLFEDREMIEERLKTYAHLFDDKVMKQLKRRHYTGWGRLSRKMINGIRDKQSGKTILDFLKSDGFSNRNFMQLIHDDSLTFKEEIEKAQVSGQGDSLHEQIADLAPAIKKGILQTVKIVDELVKVMGHKPENIVIEMARENQTTTKGLQQSRERKKRIEEGIKELESQILKENPVENTQLQNEKLYLYYLQNGRDMYVDQELDINRLSDYDVDAIVPQSFIKDDSIDNKVLTRSVENRGKSDNVPSEEVVKKMKNYWRQLLNAKLITQRKFDNLTKAERGGLSEADKAGFIKRQLVETRQITKHVARILDSRMNTKRDKNDKPIREVKVITLKSKLVSDFRKDFQLYKVRDINNYHHAHDAYLNAVVGTALIKKYPKLESEFVYGDYKVYDVRKMIAKSEQEIGKATAKRFFYSNIMNFFKTEVKLANGEIRKRPLIETNGETGEVVWNKEKDFVRKVLAMPQVNIVKKTEVQTGGFSKESILSKRESAKLIPRKKGWDTRKYGGFGSPTVAYSILVVAKVEKGKAKKLKSVKVLVGITIMEKGSYEKDPIGFLEAKGYKDIKKELIFKLPKYSLFELENGRRRMLASATELQKAGGSAGGTGGSIQNFRVYYRDSRNPLWKGPAKLLWKGEGAWIQDNSDIKWPRRKAKIIRDGGSAGGTGGSYQTVTEVLDATLIYQSITGLYETRTDLSQLGGDKRPAATKKAGQAKKKK

SEQ ID NO: 35 - protein, 1660 aa, Artificial Sequence
  dScCas9-FokI-HIVIN4
  misc_feature: synthetic
MAPKKKRKVGGSGSQLVKSELEEKKSELRHKLKYVPHEYIELIEIARNSTQDRILEMKVMEFFMKVYGYRGKHLGGSRKPDGAIYTVGSPIDYGVIVDTKAYSGGYNLPIGQADEMQRYVEENQTRNKHINPNEWWKVYPSSVTEFKFLFVSGHFKGNYKAQLTRLNHITNCNGAVLSVEELLIGGEMIKAGTLTLEEVRRKFNNGEINFSGSETPGTSESATPESEKKYSIGLAIGTNSVGWAVITDDYKVPSKKFKVLGNTNRKSIKKNLMGALLFDSGETAEATRLKRTARRRYTRRKNRIRYLQEIFANEMAKLDDSFFQRLEESFLVEEDKKNERHPIFGNLADEVAYHRNYPTIYHLRKKLADSPEKADLRLIYLALAHIIKFRGHFLIEGKLNAENSDVAKLFYQLIQTYNQLFEESPLDEIEVDAKGILSARLSKSKRLEKLIAVFPNEKKNGLFGNIIALALGLTPNFKSNFDLTEDAKLQLSKDTYDDDLDELLGQIGDQYADLFSAAKNLSDAILLSDILRSNSEVTKAPLSMVKRYDEHHQDLALLKTLVRQQFPEKYAEIFKDDTKNGYAGYVGIGIKHRKRTTKLATQEEFYKFIKPILEKMDGAEELLAKLNRDDLLRKQRTFDNGSIPHQIHLKELHAILRRQEEFYPFLKENREKIEKILTFRIPYYVGPLARGNSRFAWLTRKSEEAITPWNFEEVVDKGAQSFIERMTNFDEQLPNKKVLPKHSLLYEYFTVYNELTKVKYVTERMRKPEFLSGEQKKAIVDLLFKTNRKVTVKQLKEDYFKKIECFDSVEIIGVEDRFNASLGTYHDLLKIIKDKDFLDNEENEDILEDIVLTLTLFEDREMIEERLKTYAHLFDDKVMKQLKRRHYTGWGRLSRKMINGIRDKQSGKTILDFLKSDGFSNRNFMQLIHDDSLTFKEEIEKAQVSGQGDSLHEQIADLAPAIKKGILQTVKIVDELVKVMGHKPENIVIEMARENQTTTKGLQQSRERKKRIEEGIKELESQILKENPVENTQLQNEKLYLYYLQNGRDMYVDQELDINRLSDYDVDAIVPQSFIKDDSIDNKVLTRSVENRGKSDNVPSEEVVKKMKNYWRQLLNAKLITQRKFDNLTKAERGGLSEADKAGFIKRQLVETRQITKHVARILDSRMNTKRDKNDKPIREVKVITLKSKLVSDFRKDFQLYKVRDINNYHHAHDAYLNAVVGTALIKKYPKLESEFVYGDYKVYDVRKMIAKSEQEIGKATAKRFFYSNIMNFFKTEVKLANGEIRKRPLIETNGETGEVVWNKEKDFVRKVLAMPQVNIVKKTEVQTGGFSKESILSKRESAKLIPRKKGWDTRKYGGFGSPTVAYSILVVAKVEKGKAKKLKSVKVLVGITIMEKGSYEKDPIGFLEAKGYKDIKKELIFKLPKYSLFELENGRRRMLASATELQKANELVLPQHLVRLLYYTQNISATTGSNNLGYIEQHREEFKEIFEKIIDFSEKYILKNKVNSNLKSSFDEQFAVSDSILLSNSFVSLLKYTSFGAGGSAGGTGGSIQNFRVYYRDSRNPLWKGPAKLLWKGEGAWIQDNSDIKWPRRKAKIIRDGGSAGGTGGSYQTVTEVLDATLIYQSITGLYETRTDLSQLGGDKRPAATKKAGQAKKKK

SEQ ID NO: 36 - protein, 1572 aa, Artificial Sequence
  dScCas9-FokI-SSO7D
  misc_feature: synthetic
MAPKKKRKVGGSGSQLVKSELEEKKSELRHKLKYVPHEYIELIEIARNSTQDRILEMKVMEFFMKVYGYRGKHLGGSRKPDGAIYTVGSPIDYGVIVDTKAYSGGYNLPIGQADEMQRYVEENQTRNKHINPNEWWKVYPSSVTEFKFLFVSGHFKGNYKAQLTRLNHITNCNGAVLSVEELLIGGEMIKAGTLTLEEVRRKFNNGEINFSGSETPGTSESATPESEKKYSIGLAIGTNSVGWAVITDDYKVPSKKFKVLGNTNRKSIKKNLMGALLFDSGETAEATRLKRTARRRYTRRKNRIRYLQEIFANEMAKLDDSFFQRLEESFLVEEDKKNERHPIFGNLADEVAYHRNYPTIYHLRKKLADSPEKADLRLIYLALAHIIKFRGHFLIEGKLNAENSDVAKLFYQLIQTYNQLFEESPLDEIEVDAKGILSARLSKSKRLEKLIAVFPNEKKNGLFGNIIALALGLTPNFKSNFDLTEDAKLQLSKDTYDDDLDELLGQIGDQYADLFSAAKNLSDAILLSDILRSNSEVTKAPLSMVKRYDEHHQDLALLKTLVRQQFPEKYAEIFKDDTKNGYAGYVGIGIKHRKRTTKLATQEEFYKFIKPILEKMDGAEELLAKLNRDDLLRKQRTFDNGSIPHQIHLKELHAILRRQEEFYPFLKENREKIEKILTFRIPYYVGPLARGNSRFAWLTRKSEEAITPWNFEEVVDKGAQSFIERMTNFDEQLPNKKVLPKHSLLYEYFTVYNELTKVKYVTERMRKPEFLSGEQKKAIVDLLFKTNRKVTVKQLKEDYFKKIECFDSVEIIGVEDRFNASLGTYHDLLKIIKDKDFLDNEENEDILEDIVLTLTLFEDREMIEERLKTYAHLFDDKVMKQLKRRHYTGWGRLSRKMINGIRDKQSGKTILDFLKSDGFSNRNFMQLIHDDSLTFKEEIEKAQVSGQGDSLHEQIADLAPAIKKGILQTVKIVDELVKVMGHKPENIVIEMARENQTTTKGLQQSRERKKRIEEGIKELESQILKENPVENTQLQNEKLYLYYLQNGRDMYVDQELDINRLSDYDVDAIVPQSFIKDDSIDNKVLTRSVENRGKSDNVPSEEVVKKMKNYWRQLLNAKLITQRKFDNLTKAERGGLSEADKAGFIKRQLVETRQITKHVARILDSRMNTKRDKNDKPIREVKVITLKSKLVSDFRKDFQLYKVRDINNYHHAHDAYLNAVVGTALIKKYPKLESEFVYGDYKVYDVRKMIAKSEQEIGKATAKRFFYSNIMNFFKTEVKLANGEIRKRPLIETNGETGEVVWNKEKDFVRKVLAMPQVNIVKKTEVQTGGFSKESILSKRESAKLIPRKKGWDTRKYGGFGSPTVAYSILVVAKVEKGKAKKLKSVKVLVGITIMEKGSYEKDPIGFLEAKGYKDIKKELIFKLPKYSLFELENGRRRMLASATELQKAGGSAGMATVKFKYKGEEKEVDISKIKKVWRVGKMISFTYDEGGGKTGRGAVSEKDAPKELLQMLEKQKKGGSAGYQTVTEVLDATLIYQSITGLYETRTDLSQLGGDKRPAATKKAGQAKKKK

SEQ ID NO: 37 - protein, 1665 aa, Artificial Sequence
  dScCas9-FokI-SSO7D2
  misc_feature: synthetic
MAPKKKRKVGGSGSQLVKSELEEKKSELRHKLKYVPHEYIELIEIARNSTQDRILEMKVMEFFMKVYGYRGKHLGGSRKPDGAIYTVGSPIDYGVIVDTKAYSGGYNLPIGQADEMQRYVEENQTRNKHINPNEWWKVYPSSVTEFKFLFVSGHFKGNYKAQLTRLNHITNCNGAVLSVEELLIGGEMIKAGTLTLEEVRRKFNNGEINFSGSETPGTSESATPESEKKYSIGLAIGTNSVGWAVITDDYKVPSKKFKVLGNTNRKSIKKNLMGALLFDSGETAEATRLKRTARRRYTRRKNRIRYLQEIFANEMAKLDDSFFQRLEESFLVEEDKKNERHPIFGNLADEVAYHRNYPTIYHLRKKLADSPEKADLRLIYLALAHIIKFRGHFLIEGKLNAENSDVAKLFYQLIQTYNQLFEESPLDEIEVDAKGILSARLSKSKRLEKLIAVFPNEKKNGLFGNIIALALGLTPNFKSNFDLTEDAKLQLSKDTYDDDLDELLGQIGDQYADLFSAAKNLSDAILLSDILRSNSEVTKAPLSMVKRYDEHHQDLALLKTLVRQQFPEKYAEIFKDDTKNGYAGYVGIGIKHRKRTTKLATQEEFYKFIKPILEKMDGAEELLAKLNRDDLLRKQRTFDNGSIPHQIHLKELHAILRRQEEFYPFLKENREKIEKILTFRIPYYVGPLARGNSRFAWLTRKSEEAITPWNFEEVVDKGAQSFIERMTNFDEQLPNKKVLPKHSLLYEYFTVYNELTKVKYVTERMRKPEFLSGEQKKAIVDLLFKTNRKVTVKQLKEDYFKKIECFDSVEIIGVEDRFNASLGTYHDLLKIIKDKDFLDNEENEDILEDIVLTLTLFEDREMIEERLKTYAHLFDDKVMKQLKRRHYTGWGRLSRKMINGIRDKQSGKTILDFLKSDGFSNRNFMQLIHDDSLTFKEEIEKAQVSGQGDSLHEQIADLAPAIKKGILQTVKIVDELVKVMGHKPENIVIEMARENQTTTKGLQQSRERKKRIEEGIKELESQILKENPVENTQLQNEKLYLYYLQNGRDMYVDQELDINRLSDYDVDAIVPQSFIKDDSIDNKVLTRSVENRGKSDNVPSEEVVKKMKNYWRQLLNAKLITQRKFDNLTKAERGGLSEADKAGFIKRQLVETRQITKHVARILDSRMNTKRDKNDKPIREVKVITLKSKLVSDFRKDFQLYKVRDINNYHHAHDAYLNAVVGTALIKKYPKLESEFVYGDYKVYDVRKMIAKSEQEIGKATAKRFFYSNIMNFFKTEVKLANGEIRKRPLIETNGETGEVVWNKEKDFVRKVLAMPQVNIVKKTEVQTGGFSKESILSKRESAKLIPRKKGWDTRKYGGFGSPTVAYSILVVAKVEKGKAKKLKSVKVLVGITIMEKGSYEKDPIGFLEAKGYKDIKKELIFKLPKYSLFELENGRRRMLASATELQKANELVLPQHLVRLLYYTQNISATTGSNNLGYIEQHREEFKEIFEKIIDFSEKYILKNKVNSNLKSSFDEQFAVSDSILLSNSFVSLLKYTSFGAGGSAGMATVKFKYKGEEKEVDISKIKKVWRVGKMISFTYDEGGGKTGRGAVSEKDAPKELLQMLEKQKKGGSAGYQTVTEVLDATLIYQSITGLYETRTDLSQLGGDKRPAATKKAGQAKKKK

SEQ ID NO: 38 - protein, 1582 aa, Artificial Sequence
  dScCas9-FokI-SSO7D3
  misc_feature: synthetic
MAPKKKRKVGGSGSQLVKSELEEKKSELRHKLKYVPHEYIELIEIARNSTQDRILEMKVMEFFMKVYGYRGKHLGGSRKPDGAIYTVGSPIDYGVIVDTKAYSGGYNLPIGQADEMQRYVEENQTRNKHINPNEWWKVYPSSVTEFKFLFVSGHFKGNYKAQLTRLNHITNCNGAVLSVEELLIGGEMIKAGTLTLEEVRRKFNNGEINFSGSETPGTSESATPESEKKYSIGLAIGTNSVGWAVITDDYKVPSKKFKVLGNTNRKSIKKNLMGALLFDSGETAEATRLKRTARRRYTRRKNRIRYLQEIFANEMAKLDDSFFQRLEESFLVEEDKKNERHPIFGNLADEVAYHRNYPTIYHLRKKLADSPEKADLRLIYLALAHIIKFRGHFLIEGKLNAENSDVAKLFYQLIQTYNQLFEESPLDEIEVDAKGILSARLSKSKRLEKLIAVFPNEKKNGLFGNIIALALGLTPNFKSNFDLTEDAKLQLSKDTYDDDLDELLGQIGDQYADLFSAAKNLSDAILLSDILRSNSEVTKAPLSMVKRYDEHHQDLALLKTLVRQQFPEKYAEIFKDDTKNGYAGYVGIGIKHRKRTTKLATQEEFYKFIKPILEKMDGAEELLAKLNRDDLLRKQRTFDNGSIPHQIHLKELHAILRRQEEFYPFLKENREKIEKILTFRIPYYVGPLARGNSRFAWLTRKSEEAITPWNFEEVVDKGAQSFIERMTNFDEQLPNKKVLPKHSLLYEYFTVYNELTKVKYVTERMRKPEFLSGEQKKAIVDLLFKTNRKVTVKQLKEDYFKKIECFDSVEIIGVEDRFNASLGTYHDLLKIIKDKDFLDNEENEDILEDIVLTLTLFEDREMIEERLKTYAHLFDDKVMKQLKRRHYTGWGRLSRKMINGIRDKQSGKTILDFLKSDGFSNRNFMQLIHDDSLTFKEEIEKAQVSGQGDSLHEQIADLAPAIKKGILQTVKIVDELVKVMGHKPENIVIEMARENQTTTKGLQQSRERKKRIEEGIKELESQILKENPVENTQLQNEKLYLYYLQNGRDMYVDQELDINRLSDYDVDAIVPQSFIKDDSIDNKVLTRSVENRGKSDNVPSEEVVKKMKNYWRQLLNAKLITQRKFDNLTKAERGGLSEADKAGFIKRQLVETRQITKHVARILDSRMNTKRDKNDKPIREVKVITLKSKLVSDFRKDFQLYKVRDINNYHHAHDAYLNAVVGTALIKKYPKLESEFVYGDYKVYDVRKMIAKSEQEIGKATAKRFFYSNIMNFFKTEVKLANGEIRKRPLIETNGETGEVVWNKEKDFVRKVLAMPQVNIVKKTEVQTGGFSKESILSKRESAKLIPRKKGWDTRKYGGFGSPTVAYSILVVAKVEKGKAKKLKSVKVLVGITIMEKGSYEKDPIGFLEAKGYKDIKKELIFKLPKYSLFELENGRRRMLASATELQKAGGSAGGTGGSMATVKFKYKGEEKEVDISKIKKVWRVGKMISFTYDEGGGKTGRGAVSEKDAPKELLQMLEKQKKGGSAGGTGGSYQTVTEVLDATLIYQSITGLYETRTDLSQLGGDKRPAATKKAGQAKKKK

SEQ ID NO: 39 - protein, 1675 aa, Artificial Sequence
  dScCas9-FokI-SSO7D4
  misc_feature: synthetic
MAPKKKRKVGGSGSQLVKSELEEKKSELRHKLKYVPHEYIELIEIARNSTQDRILEMKVMEFFMKVYGYRGKHLGGSRKPDGAIYTVGSPIDYGVIVDTKAYSGGYNLPIGQADEMQRYVEENQTRNKHINPNEWWKVYPSSVTEFKFLFVSGHFKGNYKAQLTRLNHITNCNGAVLSVEELLIGGEMIKAGTLTLEEVRRKFNNGEINFSGSETPGTSESATPESEKKYSIGLAIGTNSVGWAVITDDYKVPSKKFKVLGNTNRKSIKKNLMGALLFDSGETAEATRLKRTARRRYTRRKNRIRYLQEIFANEMAKLDDSFFQRLEESFLVEEDKKNERHPIFGNLADEVAYHRNYPTIYHLRKKLADSPEKADLRLIYLALAHIIKFRGHFLIEGKLNAENSDVAKLFYQLIQTYNQLFEESPLDEIEVDAKGILSARLSKSKRLEKLIAVFPNEKKNGLFGNIIALALGLTPNFKSNFDLTEDAKLQLSKDTYDDDLDELLGQIGDQYADLFSAAKNLSDAILLSDILRSNSEVTKAPLSMVKRYDEHHQDLALLKTLVRQQFPEKYAEIFKDDTKNGYAGYVGIGIKHRKRTTKLATQEEFYKFIKPILEKMDGAEELLAKLNRDDLLRKQRTFDNGSIPHQIHLKELHAILRRQEEFYPFLKENREKIEKILTFRIPYYVGPLARGNSRFAWLTRKSEEAITPWNFEEVVDKGAQSFIERMTNFDEQLPNKKVLPKHSLLYEYFTVYNELTKVKYVTERMRKPEFLSGEQKKAIVDLLFKTNRKVTVKQLKEDYFKKIECFDSVEIIGVEDRFNASLGTYHDLLKIIKDKDFLDNEENEDILEDIVLTLTLFEDREMIEERLKTYAHLFDDKVMKQLKRRHYTGWGRLSRKMINGIRDKQSGKTILDFLKSDGFSNRNFMQLIHDDSLTFKEEIEKAQVSGQGDSLHEQIADLAPAIKKGILQTVKIVDELVKVMGHKPENIVIEMARENQTTTKGLQQSRERKKRIEEGIKELESQILKENPVENTQLQNEKLYLYYLQNGRDMYVDQELDINRLSDYDVDAIVPQSFIKDDSIDNKVLTRSVENRGKSDNVPSEEVVKKMKNYWRQLLNAKLITQRKFDNLTKAERGGLSEADKAGFIKRQLVETRQITKHVARILDSRMNTKRDKNDKPIREVKVITLKSKLVSDFRKDFQLYKVRDINNYHHAHDAYLNAVVGTALIKKYPKLESEFVYGDYKVYDVRKMIAKSEQEIGKATAKRFFYSNIMNFFKTEVKLANGEIRKRPLIETNGETGEVVWNKEKDFVRKVLAMPQVNIVKKTEVQTGGFSKESILSKRESAKLIPRKKGWDTRKYGGFGSPTVAYSILVVAKVEKGKAKKLKSVKVLVGITIMEKGSYEKDPIGFLEAKGYKDIKKELIFKLPKYSLFELENGRRRMLASATELQKANELVLPQHLVRLLYYTQNISATTGSNNLGYIEQHREEFKEIFEKIIDFSEKYILKNKVNSNLKSSFDEQFAVSDSILLSNSFVSLLKYTSFGAGGSAGGTGGSMATVKFKYKGEEKEVDISKIKKVWRVGKMISFTYDEGGGKTGRGAVSEKDAPKELLQMLEKQKKGGSAGGTGGSYQTVTEVLDATLIYQSITGLYETRTDLSQLGGDKRPAATKKAGQAKKKK

SEQ ID NO: 40 - protein, 1572 aa, Artificial Sequence
  dScCas9-FokI-STO7
  misc_feature: synthetic
MAPKKKRKVGGSGSQLVKSELEEKKSELRHKLKYVPHEYIELIEIARNSTQDRILEMKVMEFFMKVYGYRGKHLGGSRKPDGAIYTVGSPIDYGVIVDTKAYSGGYNLPIGQADEMQRYVEENQTRNKHINPNEWWKVYPSSVTEFKFLFVSGHFKGNYKAQLTRLNHITNCNGAVLSVEELLIGGEMIKAGTLTLEEVRRKFNNGEINFSGSETPGTSESATPESEKKYSIGLAIGTNSVGWAVITDDYKVPSKKFKVLGNTNRKSIKKNLMGALLFDSGETAEATRLKRTARRRYTRRKNRIRYLQEIFANEMAKLDDSFFQRLEESFLVEEDKKNERHPIFGNLADEVAYHRNYPTIYHLRKKLADSPEKADLRLIYLALAHIIKFRGHFLIEGKLNAENSDVAKLFYQLIQTYNQLFEESPLDEIEVDAKGILSARLSKSKRLEKLIAVFPNEKKNGLFGNIIALALGLTPNFKSNFDLTEDAKLQLSKDTYDDDLDELLGQIGDQYADLFSAAKNLSDAILLSDILRSNSEVTKAPLSMVKRYDEHHQDLALLKTLVRQQFPEKYAEIFKDDTKNGYAGYVGIGIKHRKRTTKLATQEEFYKFIKPILEKMDGAEELLAKLNRDDLLRKQRTFDNGSIPHQIHLKELHAILRRQEEFYPFLKENREKIEKILTFRIPYYVGPLARGNSRFAWLTRKSEEAITPWNFEEVVDKGAQSFIERMTNFDEQLPNKKVLPKHSLLYEYFTVYNELTKVKYVTERMRKPEFLSGEQKKAIVDLLFKTNRKVTVKQLKEDYFKKIECFDSVEIIGVEDRFNASLGTYHDLLKIIKDKDFLDNEENEDILEDIVLTLTLFEDREMIEERLKTYAHLFDDKVMKQLKRRHYTGWGRLSRKMINGIRDKQSGKTILDFLKSDGFSNRNFMQLIHDDSLTFKEEIEKAQVSGQGDSLHEQIADLAPAIKKGILQTVKIVDELVKVMGHKPENIVIEMARENQTTTKGLQQSRERKKRIEEGIKELESQILKENPVENTQLQNEKLYLYYLQNGRDMYVDQELDINRLSDYDVDAIVPQSFIKDDSIDNKVLTRSVENRGKSDNVPSEEVVKKMKNYWRQLLNAKLITQRKFDNLTKAERGGLSEADKAGFIKRQLVETRQITKHVARILDSRMNTKRDKNDKPIREVKVITLKSKLVSDFRKDFQLYKVRDINNYHHAHDAYLNAVVGTALIKKYPKLESEFVYGDYKVYDVRKMIAKSEQEIGKATAKRFFYSNIMNFFKTEVKLANGEIRKRPLIETNGETGEVVWNKEKDFVRKVLAMPQVNIVKKTEVQTGGFSKESILSKRESAKLIPRKKGWDTRKYGGFGSPTVAYSILVVAKVEKGKAKKLKSVKVLVGITIMEKGSYEKDPIGFLEAKGYKDIKKELIFKLPKYSLFELENGRRRMLASATELQKAGGSAGMVTVKFKYKGEEKEVDISKIKKVWRVGKMISFTYDDNGKTGRGAVSEKDAPKELLQMLEKSGKKGGSAGYQTVTEVLDATLIYQSITGLYETRTDLSQLGGDKRPAATKKAGQAKKKK

SEQ ID NO: 41 - protein, 1665 aa, Artificial Sequence
  dScCas9-FokI-STO72
  misc_feature: synthetic
MAPKKKRKVGGSGSQLVKSELEEKKSELRHKLKYVPHEYIELIEIARNSTQDRILEMKVMEFFMKVYGYRGKHLGGSRKPDGAIYTVGSPIDYGVIVDTKAYSGGYNLPIGQADEMQRYVEENQTRNKHINPNEWWKVYPSSVTEFKFLFVSGHFKGNYKAQLTRLNHITNCNGAVLSVEELLIGGEMIKAGTLTLEEVRRKFNNGEINFSGSETPGTSESATPESEKKYSIGLAIGTNSVGWAVITDDYKVPSKKFKVLGNTNRKSIKKNLMGALLFDSGETAEATRLKRTARRRYTRRKNRIRYLQEIFANEMAKLDDSFFQRLEESFLVEEDKKNERHPIFGNLADEVAYHRNYPTIYHLRKKLADSPEKADLRLIYLALAHIIKFRGHFLIEGKLNAENSDVAKLFYQLIQTYNQLFEESPLDEIEVDAKGILSARLSKSKRLEKLIAVFPNEKKNGLFGNIIALALGLTPNFKSNFDLTEDAKLQLSKDTYDDDLDELLGQIGDQYADLFSAAKNLSDAILLSDILRSNSEVTKAPLSMVKRYDEHHQDLALLKTLVRQQFPEKYAEIFKDDTKNGYAGYVGIGIKHRKRTTKLATQEEFYKFIKPILEKMDGAEELLAKLNRDDLLRKQRTFDNGSIPHQIHLKELHAILRRQEEFYPFLKENREKIEKILTFRIPYYVGPLARGNSRFAWLTRKSEEAITPWNFEEVVDKGAQSFIERMTNFDEQLPNKKVLPKHSLLYEYFTVYNELTKVKYVTERMRKPEFLSGEQKKAIVDLLFKTNRKVTVKQLKEDYFKKIECFDSVEIIGVEDRFNASLGTYHDLLKIIKDKDFLDNEENEDILEDIVLTLTLFEDREMIEERLKTYAHLFDDKVMKQLKRRHYTGWGRLSRKMINGIRDKQSGKTILDFLKSDGFSNRNFMQLIHDDSLTFKEEIEKAQVSGQGDSLHEQIADLAPAIKKGILQTVKIVDELVKVMGHKPENIVIEMARENQTTTKGLQQSRERKKRIEEGIKELESQILKENPVENTQLQNEKLYLYYLQNGRDMYVDQELDINRLSDYDVDAIVPQSFIKDDSIDNKVLTRSVENRGKSDNVPSEEVVKKMKNYWRQLLNAKLITQRKFDNLTKAERGGLSEADKAGFIKRQLVETRQITKHVARILDSRMNTKRDKNDKPIREVKVITLKSKLVSDFRKDFQLYKVRDINNYHHAHDAYLNAVVGTALIKKYPKLESEFVYGDYKVYDVRKMIAKSEQEIGKATAKRFFYSNIMNFFKTEVKLANGEIRKRPLIETNGETGEVVWNKEKDFVRKVLAMPQVNIVKKTEVQTGGFSKESILSKRESAKLIPRKKGWDTRKYGGFGSPTVAYSILVVAKVEKGKAKKLKSVKVLVGITIMEKGSYEKDPIGFLEAKGYKDIKKELIFKLPKYSLFELENGRRRMLASATELQKANELVLPQHLVRLLYYTQNISATTGSNNLGYIEQHREEFKEIFEKIIDFSEKYILKNKVNSNLKSSFDEQFAVSDSILLSNSFVSLLKYTSFGAGGSAGMVTVKFKYKGEEKEVDISKIKKVWRVGKMISFTYDDNGKTGRGAVSEKDAPKELLQMLEKSGKKGGSAGYQTVTEVLDATLIYQSITGLYETRTDLSQLGGDKRPAATKKAGQAKKKK

SEQ ID NO: 42 - protein, 1582 aa, Artificial Sequence
  dScCas9-FokI-STO73
  misc_feature: synthetic
MAPKKKRKVGGSGSQLVKSELEEKKSELRHKLKYVPHEYIELIEIARNSTQDRILEMKVMEFFMKVYGYRGKHLGGSRKPDGAIYTVGSPIDYGVIVDTKAYSGGYNLPIGQADEMQRYVEENQTRNKHINPNEWWKVYPSSVTEFKFLFVSGHFKGNYKAQLTRLNHITNCNGAVLSVEELLIGGEMIKAGTLTLEEVRRKFNNGEINFSGSETPGTSESATPESEKKYSIGLAIGTNSVGWAVITDDYKVPSKKFKVLGNTNRKSIKKNLMGALLFDSGETAEATRLKRTARRRYTRRKNRIRYLQEIFANEMAKLDDSFFQRLEESFLVEEDKKNERHPIFGNLADEVAYHRNYPTIYHLRKKLADSPEKADLRLIYLALAHIIKFRGHFLIEGKLNAENSDVAKLFYQLIQTYNQLFEESPLDEIEVDAKGILSARLSKSKRLEKLIAVFPNEKKNGLFGNIIALALGLTPNFKSNFDLTEDAKLQLSKDTYDDDLDELLGQIGDQYADLFSAAKNLSDAILLSDILRSNSEVTKAPLSMVKRYDEHHQDLALLKTLVRQQFPEKYAEIFKDDTKNGYAGYVGIGIKHRKRTTKLATQEEFYKFIKPILEKMDGAEELLAKLNRDDLLRKQRTFDNGSIPHQIHLKELHAILRRQEEFYPFLKENREKIEKILTFRIPYYVGPLARGNSRFAWLTRKSEEAITPWNFEEVVDKGAQSFIERMTNFDEQLPNKKVLPKHSLLYEYFTVYNELTKVKYVTERMRKPEFLSGEQKKAIVDLLFKTNRKVTVKQLKEDYFKKIECFDSVEIIGVEDRFNASLGTYHDLLKIIKDKDFLDNEENEDILEDIVLTLTLFEDREMIEERLKTYAHLFDDKVMKQLKRRHYTGWGRLSRKMINGIRDKQSGKTILDFLKSDGFSNRNFMQLIHDDSLTFKEEIEKAQVSGQGDSLHEQIADLAPAIKKGILQTVKIVDELVKVMGHKPENIVIEMARENQTTTKGLQQSRERKKRIEEGIKELESQILKENPVENTQLQNEKLYLYYLQNGRDMYVDQELDINRLSDYDVDAIVPQSFIKDDSIDNKVLTRSVENRGKSDNVPSEEVVKKMKNYWRQLLNAKLITQRKFDNLTKAERGGLSEADKAGFIKRQLVETRQITKHVARILDSRMNTKRDKNDKPIREVKVITLKSKLVSDFRKDFQLYKVRDINNYHHAHDAYLNAVVGTALIKKYPKLESEFVYGDYKVYDVRKMIAKSEQEIGKATAKRFFYSNIMNFFKTEVKLANGEIRKRPLIETNGETGEVVWNKEKDFVRKVLAMPQVNIVKKTEVQTGGFSKESILSKRESAKLIPRKKGWDTRKYGGFGSPTVAYSILVVAKVEKGKAKKLKSVKVLVGITIMEKGSYEKDPIGFLEAKGYKDIKKELIFKLPKYSLFELENGRRRMLASATELQKAGGSAGGTGGSMVTVKFKYKGEEKEVDISKIKKVWRVGKMISFTYDDNGKTGRGAVSEKDAPKELLQMLEKSGKKGGSAGGTGGSYQTVTEVLDATLIYQSITGLYETRTDLSQLGGDKRPAATKKAGQAKKKK

SEQ ID NO: 43 - protein, 1675 aa, Artificial Sequence
  dScCas9-FokI-STO74
  misc_feature: synthetic
MAPKKKRKVGGSGSQLVKSELEEKKSELRHKLKYVPHEYIELIEIARNSTQDRILEMKVMEFFMKVYGYRGKHLGGSRKPDGAIYTVGSPIDYGVIVDTKAYSGGYNLPIGQADEMQRYVEENQTRNKHINPNEWWKVYPSSVTEFKFLFVSGHFKGNYKAQLTRLNHITNCNGAVLSVEELLIGGEMIKAGTLTLEEVRRKFNNGEINFSGSETPGTSESATPESEKKYSIGLAIGTNSVGWAVITDDYKVPSKKFKVLGNTNRKSIKKNLMGALLFDSGETAEATRLKRTARRRYTRRKNRIRYLQEIFANEMAKLDDSFFQRLEESFLVEEDKKNERHPIFGNLADEVAYHRNYPTIYHLRKKLADSPEKADLRLIYLALAHIIKFRGHFLIEGKLNAENSDVAKLFYQLIQTYNQLFEESPLDEIEVDAKGILSARLSKSKRLEKLIAVFPNEKKNGLFGNIIALALGLTPNFKSNFDLTEDAKLQLSKDTYDDDLDELLGQIGDQYADLFSAAKNLSDAILLSDILRSNSEVTKAPLSMVKRYDEHHQDLALLKTLVRQQFPEKYAEIFKDDTKNGYAGYVGIGIKHRKRTTKLATQEEFYKFIKPILEKMDGAEELLAKLNRDDLLRKQRTFDNGSIPHQIHLKELHAILRRQEEFYPFLKENREKIEKILTFRIPYYVGPLARGNSRFAWLTRKSEEAITPWNFEEVVDKGAQSFIERMTNFDEQLPNKKVLPKHSLLYEYFTVYNELTKVKYVTERMRKPEFLSGEQKKAIVDLLFKTNRKVTVKQLKEDYFKKIECFDSVEIIGVEDRFNASLGTYHDLLKIIKDKDFLDNEENEDILEDIVLTLTLFEDREMIEERLKTYAHLFDDKVMKQLKRRHYTGWGRLSRKMINGIRDKQSGKTILDFLKSDGFSNRNFMQLIHDDSLTFKEEIEKAQVSGQGDSLHEQIADLAPAIKKGILQTVKIVDELVKVMGHKPENIVIEMARENQTTTKGLQQSRERKKRIEEGIKELESQILKENPVENTQLQNEKLYLYYLQNGRDMYVDQELDINRLSDYDVDAIVPQSFIKDDSIDNKVLTRSVENRGKSDNVPSEEVVKKMKNYWRQLLNAKLITQRKFDNLTKAERGGLSEADKAGFIKRQLVETRQITKHVARILDSRMNTKRDKNDKPIREVKVITLKSKLVSDFRKDFQLYKVRDINNYHHAHDAYLNAVVGTALIKKYPKLESEFVYGDYKVYDVRKMIAKSEQEIGKATAKRFFYSNIMNFFKTEVKLANGEIRKRPLIETNGETGEVVWNKEKDFVRKVLAMPQVNIVKKTEVQTGGFSKESILSKRESAKLIPRKKGWDTRKYGGFGSPTVAYSILVVAKVEKGKAKKLKSVKVLVGITIMEKGSYEKDPIGFLEAKGYKDIKKELIFKLPKYSLFELENGRRRMLASATELQKANELVLPQHLVRLLYYTQNISATTGSNNLGYIEQHREEFKEIFEKIIDFSEKYILKNKVNSNLKSSFDEQFAVSDSILLSNSFVSLLKYTSFGAGGSAGGTGGSMVTVKFKYKGEEKEVDISKIKKVWRVGKMISFTYDDNGKTGRGAVSEKDAPKELLQMLEKSGKKGGSAGGTGGSYQTVTEVLDATLIYQSITGLYETRTDLSQLGGDKRPAATKKAGQAKKKK

SEQ ID NO: 44 - protein, 1436 aa, Artificial Sequence
  dScCas9-FokI-StkC
  misc_feature: synthetic
MEKKYSIGLAIGTNSVGWAVITDDYKVPSKKFKVLGNTNRKSIKKNLMGALLFDSGETAEATRLKRTARRRYTRRKNRIRYLQEIFANEMAKLDDSFFQRLEESFLVEEDKKNERHPIFGNLADEVAYHRNYPTIYHLRKKLADSPEKADLRLIYLALAHIIKFRGHFLIEGKLNAENSDVAKLFYQLIQTYNQLFEESPLDEIEVDAKGILSARLSKSKRLEKLIAVFPNEKKNGLFGNIIALALGLTPNFKSNFDLTEDAKLQLSKDTYDDDLDELLGQIGDQYADLFSAAKNLSDAILLSDILRSNSEVTKAPLSASMVKRYDEHHQDLALLKTLVRQQFPEKYAEIFKDDTKNGYAGYVGIGIKHRKRTTKLATQEEFYKFIKPILEKMDGAEELLAKLNRDDLLRKQRTFDNGSIPHQIHLKELHAILRRQEEFYPFLKENREKIEKILTFRIPYYVGPLARGNSRFAWLTRKSEEAITPWNFEEVVDKGASAQSFIERMTNFDEQLPNKKVLPKHSLLYEYFTVYNELTKVKYVTERMRKPEFLSGEQKKAIVDLLFKTNRKVTVKQLKEDYFKKIECFDSVEIIGVEDRFNASLGTYHDLLKIIKDKDFLDNEENEDILEDIVLTLTLFEDREMIEERLKTYAHLFDDKVMKQLKRRHYTGWGRLSRKMINGIRDKQSGKTILDFLKSDGFSNRNFMQLIHDDSLTFKEEIEKAQVSGQGDSLHEQIADLAGSPAIKKGILQTVKIVDELVKVMGHKPENIVIEMARENQTTTKGLQQSRERKKRIEEGIKELESQILKENPVENTQLQNEKLYLYYLQNGRDMYVDQELDINRLSDYDVDAIVPQSFIKDDSIDNKVLTRSVENRGKSDNVPSEEVVKKMKNYWRQLLNAKLITQRKFDNLTKAERGGLSEADKAGFIKRQLVETRQITKHVARILDSRMNTKRDKNDKPIREVKVITLKSKLVSDFRKDFQLYKVRDINNYHHAHDAYLNAVVGTALIKKYPKLESEFVYGDYKVYDVRKMIAKSEQEIGKATAKRFFYSNIMNFFKTEVKLANGEIRKRPLIETNGETGEVVWNKEKDFATVRKVLAMPQVNIVKKTEVQTGGFSKESILSKRESAKLIPRKKGWDTRKYGGFGSPTVAYSILVVAKVEKGKAKKLKSVKVLVGITIMEKGSYEKDPIGFLEAKGYKDIKKELIFKLPKYSLFELENGRRRMLASATELQKANELVLPQHLVRLLYYTQNISATTGSNNLGYIEQHREEFKEIFEKIIDFSEKYILKNKVNSNLKSSFDEQFAVSDSILLSNSFVSLLKYTSFGASGGFSVSMVHSERLPLLMNRNGIRFQSEVIDPNPPKKVKWVLTGSGGNMFTANVRGSNVSSLVKHTWSEAFVSLIEDRYQTVTEVLDATLIYQSITGLYETRTDLSQLGGD

SEQ ID NO: 45 - protein, 1222 aa, Artificial Sequence
  dCasX-FokI
  misc_feature: synthetic
MAVTAPKKKRKVGGSGSQLVKSELEEKKSELRHKLKYVPHEYIELIEIARNSTQDRILEMKVMEFFMKVYGYRGKHLGGSRKPDGAIYTVGSPIDYGVIVDTKAYSGGYNLPIGQADEMQRYVEENQTRNKHINPNEWWKVYPSSVTEFKFLFVSGHFKGNYKAQLTRLNHITNCNGAVLSVEELLIGGEMIKAGTLTLEEVRRKFNNGEINFSGSETPGTSESATPESGTEKRINKIRKKLSADNATKPVSRSGPMKTLLVRVMTDDLKKRLEKRRKKPEVMPQVISNNAANNLRMLLDDYTKMKEAILQVYWQEFKDDHVGLMCKFAQPASKKIDQNKLKPEMDEKGNLTTAGFACSQCGQPLFVYKLEQVSEKGKAYTNYFGRCNVAEHEKLILLAQLKPEKDSDEAVTYSLGASKFGQRALDFYSIHVTKESTHPVKPLAQIAGNRYASGPVGKALSDACMGTIASFLSKYQDIIIEHQKVVKGNQKRLESLRELAGKENLEYPSVTLPPQPHTKEGVDAYNEVIARVRMWVNLNLWQKLKLSRDDAKPLLRLKGFPSFPVVERRENEVDWWNTINEVKKLIDAKRDMGRVFWSGVTAEKRNTILEGYNYLPNENDHKKREGSLENPKKPAKRQFGDLLLYLEKKYAGDWGKVFDEAWERIDKKIAGLTSHIEREEARNAEDAQSKAVLTDWLRAKASFVLERLKEMDEKEFYACEIQLQKWYGDLRGNPFAVEAENRVVDISAFSIGSDGHSIQYRNLLAWKYLENGKREFYLLMNYGKKGRIRFTDGTDIKKSGKWQGLLYGGGKAKVIDLTFDPDDEQLIILPLAFGTRQGREFIWNDLLSLETGLIKLANGRVIEKTIYNKKIGRDEPALFVALTFERREVVDPSNIKPVNLIGVARGENIPAVIATLDPEGCPLPEFKDSSGGPTDILRIGEGYKEKQRAIQAAKEVEQRRAGGYSRKFASKSRNLADDMVRNSARDLFYHAVTHDAVLVFANLSRGFGRQGKRTFMTERQYTKMEDWLTAKLAYEGLTSKTYLSKTLAQYTSKTCSNCGFTITTADYDGMLVRLKKTSDGWATTLNNKELKAEGQITYYNRYKRQTVEKELSAELDRLSEESGNNDISKWTKGRRDEALFLLKKRFSHGSRPVQEQFVCLDCGHEVHAAEQAALNIARSWLFLNSNSTEFKSYKSGKQPFVGAWQAFYKRRLKEVWKPNAGA

SEQ ID NO: 46 - protein, 1135 aa, Artificial Sequence
  dCasX-FokI Dntsb
  misc_feature: synthetic
MAVTAPKKKRKVGGSGSQLVKSELEEKKSELRHKLKYVPHEYIELIEIARNSTQDRILEMKVMEFFMKVYGYRGKHLGGSRKPDGAIYTVGSPIDYGVIVDTKAYSGGYNLPIGQADEMQRYVEENQTRNKHINPNEWWKVYPSSVTEFKFLFVSGHFKGNYKAQLTRLNHITNCNGAVLSVEELLIGGEMIKAGTLTLEEVRRKFNNGEINFSGSETPGTSESATPESGTEKRINKIRKKLSADNATKPVSRSGPMKTLLVRVMTDDLKKRLEKRRKKPEVMPQVISNNAANNLRMLLDDYTKMKEAILQVYWQEFKDDHVGLMCKFAASKFGQRALDFYSIHVTKESTHPVKPLAQIAGNRYASGPVGKALSDACMGTIASFLSKYQDIIIEHQKVVKGNQKRLESLRELAGKENLEYPSVTLPPQPHTKEGVDAYNEVIARVRMWVNLNLWQKLKLSRDDAKPLLRLKGFPSFPVVERRENEVDWWNTINEVKKLIDAKRDMGRVFWSGVTAEKRNTILEGYNYLPNENDHKKREGSLENPKKPAKRQFGDLLLYLEKKYAGDWGKVFDEAWERIDKKIAGLTSHIEREEARNAEDAQSKAVLTDWLRAKASFVLERLKEMDEKEFYACEIQLQKWYGDLRGNPFAVEAENRVVDISAFSIGSDGHSIQYRNLLAWKYLENGKREFYLLMNYGKKGRIRFTDGTDIKKSGKWQGLLYGGGKAKVIDLTFDPDDEQLIILPLAFGTRQGREFIWNDLLSLETGLIKLANGRVIEKTIYNKKIGRDEPALFVALTFERREVVDPSNIKPVNLIGVARGENIPAVIATLDPEGCPLPEFKDSSGGPTDILRIGEGYKEKQRAIQAAKEVEQRRAGGYSRKFASKSRNLADDMVRNSARDLFYHAVTHDAVLVFANLSRGFGRQGKRTFMTERQYTKMEDWLTAKLAYEGLTSKTYLSKTLAQYTSKTCSNCGFTITTADYDGMLVRLKKTSDGWATTLNNKELKAEGQITYYNRYKRQTVEKELSAELDRLSEESGNNDISKWTKGRRDEALFLLKKRFSHGSRPVQEQFVCLDCGHEVHAAEQAALNIARSWLFLNSNSTEFKSYKSGKQPFVGAWQAFYKRRLKEVWKPNAGA

SEQ ID NO: 47 - protein, 1132 aa, Artificial Sequence
  dCasX-FokI dTSL
  misc_feature: synthetic
MAVTAPKKKRKVGGSGSQLVKSELEEKKSELRHKLKYVPHEYIELIEIARNSTQDRILEMKVMEFFMKVYGYRGKHLGGSRKPDGAIYTVGSPIDYGVIVDTKAYSGGYNLPIGQADEMQRYVEENQTRNKHINPNEWWKVYPSSVTEFKFLFVSGHFKGNYKAQLTRLNHITNCNGAVLSVEELLIGGEMIKAGTLTLEEVRRKFNNGEINFSGSETPGTSESATPESGTEKRINKIRKKLSADNATKPVSRSGPMKTLLVRVMTDDLKKRLEKRRKKPEVMPQVISNNAANNLRMLLDDYTKMKEAILQVYWQEFKDDHVGLMCKFAQPASKKIDQNKLKPEMDEKGNLTTAGFACSQCGQPLFVYKLEQVSEKGKAYTNYFGRCNVAEHEKLILLAQLKPEKDSDEAVTYSLGASKFGQRALDFYSIHVTKESTHPVKPLAQIAGNRYASGPVGKALSDACMGTIASFLSKYQDIIIEHQKVVKGNQKRLESLRELAGKENLEYPSVTLPPQPHTKEGVDAYNEVIARVRMWVNLNLWQKLKLSRDDAKPLLRLKGFPSFPVVERRENEVDWWNTINEVKKLIDAKRDMGRVFWSGVTAEKRNTILEGYNYLPNENDHKKREGSLENPKKPAKRQFGDLLLYLEKKYAGDWGKVFDEAWERIDKKIAGLTSHIEREEARNAEDAQSKAVLTDWLRAKASFVLERLKEMDEKEFYACEIQLQKWYGDLRGNPFAVEAENRVVDISAFSIGSDGHSIQYRNLLAWKYLENGKREFYLLMNYGKKGRIRFTDGTDIKKSGKWQGLLYGGGKAKVIDLTFDPDDEQLIILPLAFGTRQGREFIWNDLLSLETGLIKLANGRVIEKTIYNKKIGRDEPALFVALTFERREVVDPSNIKPVNLIGVARGENIPAVIATLDPEGCPLPEFKDSSGGPTDILRIGEGYKEKQRAIQAAKEVEQRRAGGYSRKFASKSRNLADDMVRNSARDLFYHAVTHDAVLVFANLSRGFGRQGKRTFMTERQYTKMEDWLTAKLAYEGLTSKTYLSKTLAQYTSKTCSNCGSRPVQEQFVCLDCGHEVHAAEQAALNIARSWLFLNSNSTEFKSYKSGKQPFVGAWQAFYKRRLKEVWKPNAGA

SEQ ID NO: 48 - protein, 1045 aa, Artificial Sequence
  dCasX-FokI dNTSB dTSL
  misc_feature: synthetic
MAVTAPKKKRKVGGSGSQLVKSELEEKKSELRHKLKYVPHEYIELIEIARNSTQDRILEMKVMEFFMKVYGYRGKHLGGSRKPDGAIYTVGSPIDYGVIVDTKAYSGGYNLPIGQADEMQRYVEENQTRNKHINPNEWWKVYPSSVTEFKFLFVSGHFKGNYKAQLTRLNHITNCNGAVLSVEELLIGGEMIKAGTLTLEEVRRKFNNGEINFSGSETPGTSESATPESGTEKRINKIRKKLSADNATKPVSRSGPMKTLLVRVMTDDLKKRLEKRRKKPEVMPQVISNNAANNLRMLLDDYTKMKEAILQVYWQEFKDDHVGLMCKFAASKFGQRALDFYSIHVTKESTHPVKPLAQIAGNRYASGPVGKALSDACMGTIASFLSKYQDIIIEHQKVVKGNQKRLESLRELAGKENLEYPSVTLPPQPHTKEGVDAYNEVIARVRMWVNLNLWQKLKLSRDDAKPLLRLKGFPSFPVVERRENEVDWWNTINEVKKLIDAKRDMGRVFWSGVTAEKRNTILEGYNYLPNENDHKKREGSLENPKKPAKRQFGDLLLYLEKKYAGDWGKVFDEAWERIDKKIAGLTSHIEREEARNAEDAQSKAVLTDWLRAKASFVLERLKEMDEKEFYACEIQLQKWYGDLRGNPFAVEAENRVVDISAFSIGSDGHSIQYRNLLAWKYLENGKREFYLLMNYGKKGRIRFTDGTDIKKSGKWQGLLYGGGKAKVIDLTFDPDDEQLIILPLAFGTRQGREFIWNDLLSLETGLIKLANGRVIEKTIYNKKIGRDEPALFVALTFERREVVDPSNIKPVNLIGVARGENIPAVIATLDPEGCPLPEFKDSSGGPTDILRIGEGYKEKQRAIQAAKEVEQRRAGGYSRKFASKSRNLADDMVRNSARDLFYHAVTHDAVLVFANLSRGFGRQGKRTFMTERQYTKMEDWLTAKLAYEGLTSKTYLSKTLAQYTSKTCSNCGSRPVQEQFVCLDCGHEVHAAEQAALNIARSWLFLNSNSTEFKSYKSGKQPFVGAWQAFYKRRLKEVWKPNAGA

SEQ ID NO: 49 - DNA, 15 bp, Artificial Sequence
  Target site on PDS exon 14
  misc_feature: synthetic
tccagatgaaagtgc

SEQ ID NO: 50 - RNA, 96 nt, Artificial Sequence
  PDS exon 14 Right target sgRNA
  misc_feature: synthetic
cuccaaaaacccguuuugauguuuuagagcuagaaauagcaaguuaaaauaaggcuaguccguuaucaacuugaaaaaguggcaccgagucggugc

SEQ ID NO: 51 - RNA, 96 nt, Artificial Sequence
  PDS exon 14 Left target sgRNA
  misc_feature: synthetic
gguugugaacuaaugggacaguuuuagagcuagaaauagcaaguuaaaauaaggcuaguccguuaucaacuugaaaaaguggcaccgagucggugc

SEQ ID NO: 52 - DNA, 76 bp, Artificial Sequence
  NekP-AtU61P cassette- Right Cas9 sgRNA scaffold
  misc_feature: synthetic
gttttagagctagaaatagcaagttaaaataaggctagtccgttatcaacttgaaaaagtggcaccgagtcggtgc

SEQ ID NO: 53 - DNA, 76 bp, Artificial Sequence
  NekP-AtU61P cassette- Left Cas9 sgRNA scaffold
  misc_feature: synthetic
gcaccgactcggtgccactttttcaagttgataacggactagccttattttaacttgctatttctagctctaaaac

SEQ ID NO: 54 - DNA, 644 bp, Artificial Sequence
  NekP-AtU61P cassette
  misc_feature: synthetic
  misc_feature (112)..(131): n is a, c, g, or t
  misc_feature (515)..(534): n is a, c, g, or t
ggatccatttaaattctagaggcgcgccaaaaaaagcaccgactcggtgccactttttcaagttgataacggactagccttattttaacttgctatttctagctctaaaacnnnnnnnnnnnnnnnnnnnnaatcgctatgtcgactctatcattatataaactaagctgctatatatcacctgatcgatgtgggacttttgatcactccagaaatctcaaaattccggcagaacaattttgaatctcgatccgtagaaacgagacggtcattgttttagttccaccacgattatatttgaaatttacgtgagtgtgagtgagacttgcataagaaaataaaatctttagttgggaaaaaattcaataatataaatgggcttgagaaggaagcgagggataggcctttttctaaaataggcccatttaagctattaacaatcttcaaaagtaccacagcgcttaggtaaagaaagcagctgagtttatatatggttagagacgaagtagtgattnnnnnnnnnnnnnnnnnnnngttttagagctagaaatagcaagttaaaataaggctagtccgttatcaacttgaaaaagtggcaccgagtcggtgcttttttttaattaatagggataacagggtaatta

SEQ ID NO: 55 - DNA, 644 bp, Artificial Sequence
  NekP-AtU61P containing PDS specific sgRNA
  misc_feature: synthetic
ggatccatttaaattctagaggcgcgccaaaaaaagcaccgactcggtgccactttttcaagttgataacggactagccttattttaacttgctatttctagctctaaaactgtcccattagttcacaaccaatcgctatgtcgactctatcattatataaactaagctgctatatatcacctgatcgatgtgggacttttgatcactccagaaatctcaaaattccggcagaacaattttgaatctcgatccgtagaaacgagacggtcattgttttagttccaccacgattatatttgaaatttacgtgagtgtgagtgagacttgcataagaaaataaaatctttagttgggaaaaaattcaataatataaatgggcttgagaaggaagcgagggataggcctttttctaaaataggcccatttaagctattaacaatcttcaaaagtaccacagcgcttaggtaaagaaagcagctgagtttatatatggttagagacgaagtagtgattctccaaaaacccgttttgatgttttagagctagaaatagcaagttaaaataaggctagtccgttatcaacttgaaaaagtggcaccgagtcggtgcttttttttaattaatagggataacagggtaatta

SEQ ID NO: 56 - protein, 1617 aa, Artificial Sequence
  dScCas9-FokI, nucleoplasmin NLS
  misc_feature: synthetic
MAPKKKRKVGGSGSQLVKSELEEKKSELRHKLKYVPHEYIELIEIARNSTQDRILEMKVMEFFMKVYGYRGKHLGGSRKPDGAIYTVGSPIDYGVIVDTKAYSGGYNLPIGQADEMQRYVEENQTRNKHINPNEWWKVYPSSVTEFKFLFVSGHFKGNYKAQLTRLNHITNCNGAVLSVEELLIGGEMIKAGTLTLEEVRRKFNNGEINFSGSETPGTSESATPESMEKKYSIGLAIGTNSVGWAVITDDYKVPSKKFKVLGNTNRKSIKKNLMGALLFDSGETAEATRLKRTARRRYTRRKNRIRYLQEIFANEMAKLDDSFFQRLEESFLVEEDKKNERHPIFGNLADEVAYHRNYPTIYHLRKKLADSPEKADLRLIYLALAHIIKFRGHFLIEGKLNAENSDVAKLFYQLIQTYNQLFEESPLDEIEVDAKGILSARLSKSKRLEKLIAVFPNEKKNGLFGNIIALALGLTPNFKSNFDLTEDAKLQLSKDTYDDDLDELLGQIGDQYADLFSAAKNLSDAILLSDILRSNSEVTKAPLSASMVKRYDEHHQDLALLKTLVRQQFPEKYAEIFKDDTKNGYAGYVGIGIKHRKRTTKLATQEEFYKFIKPILEKMDGAEELLAKLNRDDLLRKQRTFDNGSIPHQIHLKELHAILRRQEEFYPFLKENREKIEKILTFRIPYYVGPLARGNSRFAWLTRKSEEAITPWNFEEVVDKGASAQSFIERMTNFDEQLPNKKVLPKHSLLYEYFTVYNELTKVKYVTERMRKPEFLSGEQKKAIVDLLFKTNRKVTVKQLKEDYFKKIECFDSVEIIGVEDRFNASLGTYHDLLKIIKDKDFLDNEENEDILEDIVLTLTLFEDREMIEERLKTYAHLFDDKVMKQLKRRHYTGWGRLSRKMINGIRDKQSGKTILDFLKSDGFSNRNFMQLIHDDSLTFKEEIEKAQVSGQGDSLHEQIADLAGSPAIKKGILQTVKIVDELVKVMGHKPENIVIEMARENQTTTKGLQQSRERKKRIEEGIKELESQILKENPVENTQLQNEKLYLYYLQNGRDMYVDQELDINRLSDYDVDAIVPQSFIKDDSIDNKVLTRSVENRGKSDNVPSEEVVKKMKNYWRQLLNAKLITQRKFDNLTKAERGGLSEADKAGFIKRQLVETRQITKHVARILDSRMNTKRDKNDKPIREVKVITLKSKLVSDFRKDFQLYKVRDINNYHHAHDAYLNAVVGTALIKKYPKLESEFVYGDYKVYDVRKMIAKSEQEIGKATAKRFFYSNIMNFFKTEVKLANGEIRKRPLIETNGETGEVVWNKEKDFATVRKVLAMPQVNIVKKTEVQTGGFSKESILSKRESAKLIPRKKGWDTRKYGGFGSPTVAYSILVVAKVEKGKAKKLKSVKVLVGITIMEKGSYEKDPIGFLEAKGYKDIKKELIFKLPKYSLFELENGRRRMLASATELQKANELVLPQHLVRLLYYTQNISATTGSNNLGYIEQHREEFKEIFEKIIDFSEKYILKNKVNSNLKSSFDEQFAVSDSILLSNSFVSLLKYTSFGASGGFTFLDLDVKQGRLRYQTVTEVLDATLIYQSITGLYETRTDLSQLGGDKRPAATKKAGQAKKKK

SEQ ID NO: 57 - DNA, 905 bp, Artificial Sequence
  2X35SP from pSAT6
  misc_feature: synthetic
caacatgtggagcacgacacacttgtctactccaaaaatatcaaagatacagtctcagaagaccaaagggcaattgagacttttcaacaaagggtaatatccggaaacctcctcggattccattgcccagctatctgtcactttattgtgaagatagtggaaaaggaaggtggctcctacaaatgccatcattgcgataaaggaaaggccatcgttgaagatgcctctgccgacagtggtcccaaagatggacccccacccacgaggagcatcgtggaaaaagaagacgttccaaccacgtcttcaaagcaagtggattgatgtgataacatggtggagcacgacacacttgtctactccaaaaatatcaaagatacagtctcagaagaccaaagggcaattgagacttttcaacaaagggtaatatccggaaacctcctcggattccattgcccagctatctgtcactttattgtgaagatagtggaaaaggaaggtggctcctacaaatgccatcattgcgataaaggaaaggccatcgttgaagatgcctctgccgacagtggtcccaaagatggacccccacccacgaggagcatcgtggaaaaagaagacgttccaaccacgtcttcaaagcaagtggattgatgtgatatctccactgacgtaagggatgacgcacaatcccactatccttcgcaagacccttcctctatataaggaagttcatttcatttggagaggacgtcgagagttctcaacacaacatatacaaaacaaacgaatctcaagcaatcaagcattctacttctattgcagcaatttaaatcatttcttttaaagcaaaagcaattttctgaaaattttcaccatttacgaacgatagtccggactcagatctcgag

SEQ ID NO: 58 - DNA, 4806 bp, Artificial Sequence
  Plant optimized dScCAS9-FokI
  misc_feature: synthetic
atggcacctaagaagaagcgaaaggttgggggatctgggagtcaactagttaagtcggagcttgaggagaaaaagtctgagctcaggcataaattaaagtacgttccccatgaatacattgagcttattgaaatcgctagaaattctacacaagatcgtatcttggaaatgaaggtgatggagtttttcatgaaggtttacgggtacagaggtaagcaccttggaggatcgagaaagccagatggagctatttacacagtaggtagtcccatagattatggcgtaatcgtagataccaaagcttatagtggcggttataatttgcctattggtcaggccgatgaaatgcaaaggtacgtagaggagaatcagacacgaaataagcatataaaccctaacgagtggtggaaagtttatccttcttcagtcacagaattcaagttcttgtttgtcagtggacatttcaaaggtaattataaagcgcaattaacaagactcaatcatataaccaactgtaatggtgcggtcctttctgtggaagagctcttgattggaggggagatgattaaggctggaactttaacgctagaggaggttcgtcgtaagtttaataacggagaaattaatttttccggatctgaaacaccgggaaccagtgagtccgctactcctgagtctatggagaagaagtactccattggattggctattggaactaactccgtgggttgggctgtgattacggatgattataaggttccgagcaaaaaatttaaggtactcggcaacaccaacaggaaatcgataaaaaagaatttgatgggtgctcttttattcgatagcggcgagactgccgaagctaccaggctcaaacgtacagcaagacgacgttatacaagaagaaagaaccgtattagatacttgcaggagattttcgcaaacgagatggctaagctcgatgactctttttttcagcgtttggaggagtcctttcttgtcgaagaagataaaaaaaacgaaagacacccgatttttgggaacctggctgatgaagttgcctaccatcgaaattacccaacaatctaccatcttagaaagaagcttgcagattctccggaaaaagccgatcttagactgatttacctagctttggcacacattatcaaattcagagggcacttccttatcgagggtaagcttaatgcggagaattccgatgttgctaagcttttttatcagctaatccagacttacaaccaactgttcgaggaaagcccacttgacgagattgaggttgatgctaaaggcatattgtcagctcgacttagtaagtcgaagagattggagaagctcatcgcggttttccctaatgagaaaaaaaatggattgtttgggaacattatagccttagctttgggattgacgcctaacttcaaaagcaacttcgatctcactgaagatgctaagcttcaactttcaaaagacacttatgatgatgatttagatgaactcctcggacaaataggggatcaatatgccgatttatttagcgctgcgaagaacctttcggacgcaatcttgctctcagatatccttagatctaattctgaagtaacgaaagctcctttatcagcgagcatggtaaaaagatatgatgagcatcatcaagatttggcacttttgaagaccttagtgcgacaacaattcccagagaaatatgctgagatatttaaggatgacacaaagaacgggtacgctggatatgtcggcattggtattaagcatcgtaagcgtacaacgaagttagctacacaagaggagttttataagtttattaagcctatattagagaagatggacggtgccgaagagttgctcgctaaactgaatcgagacgatttgctacgaaagcagagaacttttgataatggaagcattcctcaccaaattcacctcaaggagcttcatgcaattttaaggagacaggaggagttttacccatttcttaaggaaaaccgtgaaaaaatagagaaaatcttgacgttccgtattccatactatgttggaccgttagcgagaggaaattctagattcgcctggctaacacgaaaatcagaagaggcaataactccatggaatttcgaggaagttgtggataagggtgcaagcgcccaaagtttcatcgaacgtatgactaacttcgatgaacagttgccaaataaaaaggtattgcctaagcattcgcttctatacgagtacttcacagtgtataatgagctaactaaggtcaaatatgtaactgagcgaatgcgtaaaccagaattcctgagcggagaacaaaaaaaggctattgtagatttgctctttaagacgaacagaaaggttactgttaaacagcttaaggaagattattttaagaagattgaatgctttgattctgttgaaatcataggagtggaggacaggtttaatgcttcattgggcacgtatcatgaccttttgaagattatcaaggacaaggacttcttagacaacgaggaaaacgaagatattttggaggacattgtcttgacattgacactgttcgaagacagggaaatgattgaagagaggttgaaaacatatgcgcatttgttcgatgataaggttatgaagcagctgaagcgtcgacactataccggctggggtagactgtctagaaaaatgataaatggtattcgtgataaacagagtgggaagacaattctagattttcttaaaagtgatgggttttctaatcgaaattttatgcagcttatccatgacgatagcctcacttttaaagaggagatcgagaaggctcaggtttctggtcaaggtgattctcttcatgaacaaattgctgaccttgctggttcccctgcaatcaaaaagggtatccttcagacagtaaaaatcgtggacgagctcgttaaagtgatggggcataaaccggaaaatatcgtaattgaaatggcaagagaaaaccaaactactaccaaaggcctacaacagtctagagagaggaaaaaaagaatagaggagggaataaaggaacttgagagtcaaatactaaaggagaaccctgtagaaaatacacaactgcagaacgaaaaattatacttgtactacttgcaaaatggccgtgatatgtatgttgaccaagaactggatattaatagactttctgattacgatgttgacgcaattgttccacagagttttattaaagatgactccatcgacaacaaggtattaacaagaagcgttgagaatagggggaagtcagataacgtaccatcagaagaagttgtcaaaaaaatgaagaactactggcgtcaattgcttaatgcaaaactgattactcagcgaaaatttgataatctcacaaaggcggagagggggggcctttcagaggcagataaggctggttttatcaagcgacagttagttgaaacaaggcaaatcacaaaacatgtcgccagaatcttagattcgagaatgaacacaaagagagataaaaatgacaagccgattagggaagtcaaggttattacattaaaatcgaaattggtctctgatttccgaaaggactttcaactttataaggtgagagatatcaacaattatcaccatgctcacgatgcgtacctaaatgccgtcgttggtacagctcttatcaagaaatatcctaagcttgaatctgaattcgtttatggagactacaaagtgtatgatgttcgaaagatgatagctaaatccgaacaagaaatcggtaaggctacagcgaaaagattcttctattccaacattatgaactttttcaaaacagaggtgaagttagctaatggagagatcagaaagcgtcctttgatcgagactaatggtgagacaggtgaagtggtgtggaataaggaaaaagattttgctaccgtaaggaaggtgctagcaatgccacaagtcaacattgttaaaaagacagaggttcagacgggtggattctctaaagagtctatcctctctaaaagggaaagcgcaaagctaattccgcgtaaaaagggatgggatacaagaaagtacgggggttttggaagcccgaccgttgcctattctatccttgttgttgctaaagttgaaaagggaaaggcaaaaaaactcaaatctgttaaagtactcgtcggcattacaataatggagaagggttcgtatgagaaagatcctattggattcctagaagcaaagggttataaagatataaaaaaggagttgatcttcaaactcccaaagtacagtcttttcgagttagagaatggtagaagaaggatgttagcctctgctacggaactccagaaagcgaatgagttagtcctgccacaacatcttgtaagactattatattatactcaaaatatttccgctaccacaggttcgaataacttgggttacattgagcaacatagagaggaattcaaggaaatattcgaaaagattatcgatttttcagaaaaatacatcttgaagaataaggttaatagcaatcttaaatcgtcgttcgatgagcagttcgctgtctcagattcaattttgttgagcaattcgtttgtttcattgttgaagtatacgtcatttggtgcctcaggcggtttcacgtttctcgatcttgatgttaaacagggcagattgagatatcagactgtgaccgaggtattagatgctactctcatctatcaaagtatcactgggctgtacgagactcgaaccgaccttagtcaacttggcggggattaa

SEQ ID NO: 59 - DNA, 235 bp, Artificial Sequence
  35ST from pSAT6
  misc_feature: synthetic
ctgcagagatccacctagtctagagtccgcaaaaatcaccagtctctctctacaaatctatctctctctatttttctccagaataatgtgtgagtagttcccagataagggaattagggttcttatagggtttcgctcatgtgttgagcatataagaaacccttagtatgtatttgtatttgtaaaatacttctatcaataaaatttctaattcctaaaaccaaaatccagtgac

SEQ ID NO: 60 - DNA, 5946 bp, Artificial Sequence
  DNA Plant optimized dScCAS9-FokI expression DNA cassette
  misc_feature: synthetic
caacatgtggagcacgacacacttgtctactccaaaaatatcaaagatacagtctcagaagaccaaagggcaattgagacttttcaacaaagggtaatatccggaaacctcctcggattccattgcccagctatctgtcactttattgtgaagatagtggaaaaggaaggtggctcctacaaatgccatcattgcgataaaggaaaggccatcgttgaagatgcctctgccgacagtggtcccaaagatggacccccacccacgaggagcatcgtggaaaaagaagacgttccaaccacgtcttcaaagcaagtggattgatgtgataacatggtggagcacgacacacttgtctactccaaaaatatcaaagatacagtctcagaagaccaaagggcaattgagacttttcaacaaagggtaatatccggaaacctcctcggattccattgcccagctatctgtcactttattgtgaagatagtggaaaaggaaggtggctcctacaaatgccatcattgcgataaaggaaaggccatcgttgaagatgcctctgccgacagtggtcccaaagatggacccccacccacgaggagcatcgtggaaaaagaagacgttccaaccacgtcttcaaagcaagtggattgatgtgatatctccactgacgtaagggatgacgcacaatcccactatccttcgcaagacccttcctctatataaggaagttcatttcatttggagaggacgtcgagagttctcaacacaacatatacaaaacaaacgaatctcaagcaatcaagcattctacttctattgcagcaatttaaatcatttcttttaaagcaaaagcaattttctgaaaattttcaccatttacgaacgatagtccggactcagatctcgagatggcacctaagaagaagcgaaaggttgggggatctgggagtcaactagttaagtcggagcttgaggagaaaaagtctgagctcaggcataaattaaagtacgttccccatgaatacattgagcttattgaaatcgctagaaattctacacaagatcgtatcttggaaatgaaggtgatggagtttttcatgaaggtttacgggtacagaggtaagcaccttggaggatcgagaaagccagatggagctatttacacagtaggtagtcccatagattatggcgtaatcgtagataccaaagcttatagtggcggttataatttgcctattggtcaggccgatgaaatgcaaaggtacgtagaggagaatcagacacgaaataagcatataaaccctaacgagtggtggaaagtttatccttcttcagtcacagaattcaagttcttgtttgtcagtggacatttcaaaggtaattataaagcgcaattaacaagactcaatcatataaccaactgtaatggtgcggtcctttctgtggaagagctcttgattggaggggagatgattaaggctggaactttaacgctagaggaggttcgtcgtaagtttaataacggagaaattaatttttccggatctgaaacaccgggaaccagtgagtccgctactcctgagtctatggagaagaagtactccattggattggctattggaactaactccgtgggttgggctgtgattacggatgattataaggttccgagcaaaaaatttaaggtactcggcaacaccaacaggaaatcgataaaaaagaatttgatgggtgctcttttattcgatagcggcgagactgccgaagctaccaggctcaaacgtacagcaagacgacgttatacaagaagaaagaaccgtattagatacttgcaggagattttcgcaaacgagatggctaagctcgatgactctttttttcagcgtttggaggagtcctttcttgtcgaagaagataaaaaaaacgaaagacacccgatttttgggaacctggctgatgaagttgcctaccatcgaaattacccaacaatctaccatcttagaaagaagcttgcagattctccggaaaaagccgatcttagactgatttacctagctttggcacacattatcaaattcagagggcacttccttatcgagggtaagcttaatgcggagaattccgatgttgctaagcttttttatcagctaatccagacttacaaccaactgttcgaggaaagcccacttgacgagattgaggttgatgctaaaggcatattgtcagctcgacttagtaagtcgaagagattggagaagctcatcgcggttttccctaatgagaaaaaaaatggattgtttgggaacattatagccttagctttgggattgacgcctaacttcaaaagcaacttcgatctcactgaagatgctaagcttcaactttcaaaagacacttatgatgatgatttagatgaactcctcggacaaataggggatcaatatgccgatttatttagcgctgcgaagaacctttcggacgcaatcttgctctcagatatccttagatctaattctgaagtaacgaaagctcctttatcagcgagcatggtaaaaagatatgatgagcatcatcaagatttggcacttttgaagaccttagtgcgacaacaattcccagagaaatatgctgagatatttaaggatgacacaaagaacgggtacgctggatatgtcggcattggtattaagcatcgtaagcgtacaacgaagttagctacacaagaggagttttataagtttattaagcctatattagagaagatggacggtgccgaagagttgctcgctaaactgaatcgagacgatttgctacgaaagcagagaacttttgataatggaagcattcctcaccaaattcacctcaaggagcttcatgcaattttaaggagacaggaggagttttacccatttcttaaggaaaaccgtgaaaaaatagagaaaatcttgacgttccgtattccatactatgttggaccgttagcgagaggaaattctagattcgcctggctaacacgaaaatcagaagaggcaataactccatggaatttcgaggaagttgtggataagggtgcaagcgcccaaagtttcatcgaacgtatgactaacttcgatgaacagttgccaaataaaaaggtattgcctaagcattcgcttctatacgagtacttcacagtgtataatgagctaactaaggtcaaatatgtaactgagcgaatgcgtaaaccagaattcctgagcggagaacaaaaaaaggctattgtagatttgctctttaagacgaacagaaaggttactgttaaacagcttaaggaagattattttaagaagattgaatgctttgattctgttgaaatcataggagtggaggacaggtttaatgcttcattgggcacgtatcatgaccttttgaagattatcaaggacaaggacttcttagacaacgaggaaaacgaagatattttggaggacattgtcttgacattgacactgttcgaagacagggaaatgattgaagagaggttgaaaacatatgcgcatttgttcgatgataaggttatgaagcagctgaagcgtcgacactataccggctggggtagactgtctagaaaaatgataaatggtattcgtgataaacagagtgggaagacaattctagattttcttaaaagtgatgggttttctaatcgaaattttatgcagcttatccatgacgatagcctcacttttaaagaggagatcgagaaggctcaggtttctggtcaaggtgattctcttcatgaacaaattgctgaccttgctggttcccctgcaatcaaaaagggtatccttcagacagtaaaaatcgtggacgagctcgttaaagtgatggggcataaaccggaaaatatcgtaattgaaatggcaagagaaaaccaaactactaccaaaggcctacaacagtctagagagaggaaaaaaagaatagaggagggaataaaggaacttgagagtcaaatactaaaggagaaccctgtagaaaatacacaactgcagaacgaaaaattatacttgtactacttgcaaaatggccgtgatatgtatgttgaccaagaactggatattaatagactttctgattacgatgttgacgcaattgttccacagagttttattaaagatgactccatcgacaacaaggtattaacaagaagcgttgagaatagggggaagtcagataacgtaccatcagaagaagttgtcaaaaaaatgaagaactactggcgtcaattgcttaatgcaaaactgattactcagcgaaaatttgataatctcacaaaggcggagagggggggcctttcagaggcagataaggctggttttatcaagcgacagttagttgaaacaaggcaaatcacaaaacatgtcgccagaatcttagattcgagaatgaacacaaagagagataaaaatgacaagccgattagggaagtcaaggttattacattaaaatcgaaattggtctctgatttccgaaaggactttcaactttataaggtgagagatatcaacaattatcaccatgctcacgatgcgtacctaaatgccgtcgttggtacagctcttatcaagaaatatcctaagcttgaatctgaattcgtttatggagactacaaagtgtatgatgttcgaaagatgatagctaaatccgaacaagaaatcggtaaggctacagcgaaaagattcttctattccaacattatgaactttttcaaaacagaggtgaagttagctaatggagagatcagaaagcgtcctttgatcgagactaatggtgagacaggtgaagtggtgtggaataaggaaaaagattttgctaccgtaaggaaggtgctagcaatgccacaagtcaacattgttaaaaagacagaggttcagacgggtggattctctaaagagtctatcctctctaaaagggaaagcgcaaagctaattccgcgtaaaaagggatgggatacaagaaagtacgggggttttggaagcccgaccgttgcctattctatccttgttgttgctaaagttgaaaagggaaaggcaaaaaaactcaaatctgttaaagtactcgtcggcattacaataatggagaagggttcgtatgagaaagatcctattggattcctagaagcaaagggttataaagatataaaaaaggagttgatcttcaaactcccaaagtacagtcttttcgagttagagaatggtagaagaaggatgttagcctctgctacggaactccagaaagcgaatgagttagtcctgccacaacatcttgtaagactattatattatactcaaaatatttccgctaccacaggttcgaataacttgggttacattgagcaacatagagaggaattcaaggaaatattcgaaaagattatcgatttttcagaaaaatacatcttgaagaataaggttaatagcaatcttaaatcgtcgttcgatgagcagttcgctgtctcagattcaattttgttgagcaattcgtttgtttcattgttgaagtatacgtcatttggtgcctcaggcggtttcacgtttctcgatcttgatgttaaacagggcagattgagatatcagactgtgaccgaggtattagatgctactctcatctatcaaagtatcactgggctgtacgagactcgaaccgaccttagtcaacttggcggggattaactgcagagatccacctagtctagagtccgcaaaaatcaccagtctctctctacaaatctatctctctctatttttctccagaataatgtgtgagtagttcccagataagggaattagggttcttatagggtttcgctcatgtgttgagcatataagaaacccttagtatgtatttgtatttgtaaaatacttctatcaataaaatttctaattcctaaaaccaaaatccagtgac

SEQ ID NO: 61 - DNA, 711 bp, Artificial Sequence
  Donor sequence comprising PD-mCherry-S encoding ORF
  misc_feature: synthetic
atggtgagcaagggcgaggaggataacatggccatcatcaaggagttcatgcccttcaaggtgcacatggagggctccgtgaacggccacgagttcgagatcgagggcgagggcgagggccgcccctacgagggcacccagaccgccaagctgaaggtgaccaagggtggccccctgcccttcgcctgggacatcctgtcccctcagttcatgtacggctccaaggcctacgtgaagcaccccgccgacatccccgactacttgaagctgtccttccccgagggcttcaagtgggagcgcgtgatgaacttcgaggacggcggcgtggtgaccgtgacccaggactcctccctgcaggacggcgagttcatctacaaggtgaagctgcgcggcaccaacttcccctccgacggccccgtaatgcagaagaagaccatgggctgggaggcctcctccgagcggatgtaccccgaggacggcgccctgaagggcgagatcaagcagaggctgaagctgaaggacggcggccactacgacgctgaggtcaagaccacctacaaggccaagaagcccgtgcagctgcccggcgcctacaacgtcaacatcaagttggacatcacctcccacaacgaggactacaccatcgtggaacagtacgaacgcgccgagggccgccactccaccggcggcatggacgagctgtacaagtaa

SEQ ID NO: 62 - DNA, 1711 bp, Artificial Sequence
  DONOR PD-MCHERRY-S for homologous recombination repair pathway
  misc_feature: synthetic
attaaccaaataaggaaaagaatcatatggtcatcaattcgtaaatcaaaattttaatttgtgtggtatttaatccatctacatgtttcgtaagcaacaaaagagcttggtctgaaaaccaaacaagaccatatgggcactcgaatactccattttgttatcggctacttccactagcctcctccttcgctgcgtctcctgtttctctacttcacgattactcgctaggtaaaagataagatactaaacaactactatagcccctttaattcaagtccgtttttttttgttcttcttcttttcaattatgtgttaaagatacaaacttttgtctgatttgcttccaccggtttcacctaagatactcaattttcttactttttgtgtgttttgtaattctaattcttttatagcttcaatttttagattcattgaagcagttgtgagttaagttggagaaaatggttgtgtttgggaatgtttctgcggcgaatttgcctatggtgagcaagggcgaggaggataacatggccatcatcaaggagttcatgcccttcaaggtgcacatggagggctccgtgaacggccacgagttcgagatcgagggcgagggcgagggccgcccctacgagggcacccagaccgccaagctgaaggtgaccaagggtggccccctgcccttcgcctgggacatcctgtcccctcagttcatgtacggctccaaggcctacgtgaagcaccccgccgacatccccgactacttgaagctgtccttccccgagggcttcaagtgggagcgcgtgatgaacttcgaggacggcggcgtggtgaccgtgacccaggactcctccctgcaggacggcgagttcatctacaaggtgaagctgcgcggcaccaacttcccctccgacggccccgtaatgcagaagaagaccatgggctgggaggcctcctccgagcggatgtaccccgaggacggcgccctgaagggcgagatcaagcagaggctgaagctgaaggacggcggccactacgacgctgaggtcaagaccacctacaaggccaagaagcccgtgcagctgcccggcgcctacaacgtcaacatcaagttggacatcacctcccacaacgaggactacaccatcgtggaacagtacgaacgcgccgagggccgccactccaccggcggcatggacgagctgtacaagtaatagctttagggttcccacttctcaagcgcttaagacaagaacaaggaggaggagtactgctggtcctttgcaggtatctacctttctggtttttaacttggagttctcgaaatttcatctagtgtataagtgtaattttgattaaagagaggaaattgcaggtagtttgtgtggatattccaaggccagagctagagaacactgtcaatttcttggaagctgctagtttatctgcatccttccgtagtgctcctcgtcctgctaagcctttgaaagttgtaattgctggtgctggtatgtctacaacttcatttcttactgctttgtttgggatctgatggaattaatgttcatgtgatgaagttcttttggctctcaaataattgcaggattggctggattgtcaactgcaaagtacctggctgatgcaggccacaaacctctgttgcttgaagcaagagatgttcttggtggaaaggtactttgattggtctcacttt

SEQ ID NO: 63 - DNA, 20 bp, Artificial Sequence
  PCR Primer2F:
  misc_feature: synthetic
accagaaaggtagatacctg

SEQ ID NO: 64 - DNA, 21 bp, Artificial Sequence
  PCR Primer2R
  misc_feature: synthetic
atttgcttccaccggtttcac

SEQ ID NO: 65 - DNA, 61 bp, Artificial Sequence
  Primer 3241.SP6P SV40NLS F
  misc_feature: synthetic
tacacatacgtatttaggtgacactatagaagagaccaccatggcccctaagaagaagaga

SEQ ID NO: 66 - DNA, 30 bp, Artificial Sequence
  Primer 3242.CASR
  misc_feature: synthetic
tttttttttttagtcgcctccgagctgaga

SEQ ID NO: 67 - RNA, 96 nt, Artificial Sequence
  sgRNA 3243EMX115R
  misc_feature: synthetic
agagccugcacuccuccaccguuuuagagcuagaaauagcaaguuaaaauaaggcuaguccguuaucaacuugaaaaaguggcaccgagucggugc

SEQ ID NO: 68 - RNA, 96 nt, Artificial Sequence
  sgRNA 3244EMX115L
  misc_feature: synthetic
ugggacucuacgaguuucuaguuuuagagcuagaaauagcaaguuaaaauaaggcuaguccguuaucaacuugaaaaaguggcaccgagucggugc

SEQ ID NO: 69 - DNA, 16 bp, Artificial Sequence
  Primer 3042
  misc_feature: synthetic
gaaaccatgcccattc

SEQ ID NO: 70 - DNA, 26 bp, Artificial Sequence
  Primer 3240
  misc_feature: synthetic
agccaaggtggaggagtgcaggctct

SEQ ID NO: 71 - DNA, 23 bp, Artificial Sequence
  Primer 1R
  misc_feature: synthetic
tttggtggaggagtgcaggctct

SEQ ID NO: 72 - DNA, 23 bp, Artificial Sequence
  Primer 2R
  misc_feature: synthetic
attggtggaggagtgcaggctct

SEQ ID NO: 73 - DNA, 23 bp, Artificial Sequence
  Primer 3R
  misc_feature: synthetic
cttggtggaggagtgcaggctct

SEQ ID NO: 74 - DNA, 23 bp, Artificial Sequence
  Primer 4R
  misc_feature: synthetic
gttggtggaggagtgcaggctct

SEQ ID NO: 75 - DNA, 23 bp, Artificial Sequence
  Primer 5R
  misc_feature: synthetic
tatggtggaggagtgcaggctct

SEQ ID NO: 76 - DNA, 23 bp, Artificial Sequence
  Primer 6R
  misc_feature: synthetic
aatggtggaggagtgcaggctct

SEQ ID NO: 77 - DNA, 23 bp, Artificial Sequence
  Primer 7R
  misc_feature: synthetic
catggtggaggagtgcaggctct

SEQ ID NO: 78 - DNA, 23 bp, Artificial Sequence
  Primer 8R
  misc_feature: synthetic
gatggtggaggagtgcaggctct

SEQ ID NO: 79 - DNA, 23 bp, Artificial Sequence
  Primer 9R
  misc_feature: synthetic
tctggtggaggagtgcaggctct

SEQ ID NO: 80 - DNA, 23 bp, Artificial Sequence
  Primer 10R
  misc_feature: synthetic
actggtggaggagtgcaggctct

SEQ ID NO: 81 - DNA, 23 bp, Artificial Sequence
  Primer 11R
  misc_feature: synthetic
cctggtggaggagtgcaggctct

SEQ ID NO: 82 - DNA, 23 bp, Artificial Sequence
  Primer 12R
  misc_feature: synthetic
gctggtggaggagtgcaggctct

SEQ ID NO: 83 - DNA, 23 bp, Artificial Sequence
  Primer 13R
  misc_feature: synthetic
tgtggtggaggagtgcaggctct

SEQ ID NO: 84 - DNA, 23 bp, Artificial Sequence
  Primer 14R
  misc_feature: synthetic
agtggtggaggagtgcaggctct

SEQ ID NO: 85 - DNA, 23 bp, Artificial Sequence
  Primer 15R
  misc_feature: synthetic
cgtggtggaggagtgcaggctct

SEQ ID NO: 86 - DNA, 23 bp, Artificial Sequence
  Primer 16R
  misc_feature: synthetic
ggtggtggaggagtgcaggctct

SEQ ID NO: 87 - DNA, 23 bp, Artificial Sequence
  Primer 17R
  misc_feature: synthetic
ttaggtggaggagtgcaggctct

SEQ ID NO: 88 - DNA, 23 bp, Artificial Sequence
  Primer 18R
  misc_feature: synthetic
ataggtggaggagtgcaggctct

SEQ ID NO: 89 - DNA, 23 bp, Artificial Sequence
  Primer 19R
ctaggtggaggagtgcaggctct

SEQ ID NO: 90 - DNA, 23 bp, Artificial Sequence
  Primer 20R
  misc_feature: synthetic
gtaggtggaggagtgcaggctct

SEQ ID NO: 91 - DNA, 23 bp, Artificial Sequence
  Primer 21R
  misc_feature: synthetic
taaggtggaggagtgcaggctct

SEQ ID NO: 92 - DNA, 23 bp, Artificial Sequence
  Primer 22R
  misc_feature: synthetic
aaaggtggaggagtgcaggctct

SEQ ID NO: 93 - DNA, 23 bp, Artificial Sequence
  Primer 23R
  misc_feature: synthetic
caaggtggaggagtgcaggctct

SEQ ID NO: 94 - DNA, 23 bp, Artificial Sequence
  Primer 24R
  misc_feature: synthetic
gaaggtggaggagtgcaggctct

SEQ ID NO: 95 - DNA, 23 bp, Artificial Sequence
  Primer 25R
  misc_feature: synthetic
tcaggtggaggagtgcaggctct

SEQ ID NO: 96 - DNA, 23 bp, Artificial Sequence
  Primer 26R
  misc_feature: synthetic
acaggtggaggagtgcaggctct

SEQ ID NO: 97 - DNA, 23 bp, Artificial Sequence
  Primer 27R
  misc_feature: synthetic
ccaggtggaggagtgcaggctct

SEQ ID NO: 98 - DNA, 23 bp, Artificial Sequence
  Primer 28R
  misc_feature: synthetic
gcaggtggaggagtgcaggctct

SEQ ID NO: 99 - DNA, 23 bp, Artificial Sequence
  Primer 29R
  misc_feature: synthetic
tgaggtggaggagtgcaggctct

SEQ ID NO: 100 - DNA, 23 bp, Artificial Sequence
  Primer 30R
  misc_feature: synthetic
agaggtggaggagtgcaggctct

SEQ ID NO: 101 - DNA, 23 bp, Artificial Sequence
  Primer 31R
  misc_feature: synthetic
cgaggtggaggagtgcaggctct

SEQ ID NO: 102 - DNA, 23 bp, Artificial Sequence
  Primer 32R
  misc_feature: synthetic
ggaggtggaggagtgcaggctct

SEQ ID NO: 103 - DNA, 23 bp, Artificial Sequence
  Primer 33R
  misc_feature: synthetic
ttcggtggaggagtgcaggctct

SEQ ID NO: 104 - DNA, 23 bp, Artificial Sequence
  Primer 34R
  misc_feature: synthetic
atcggtggaggagtgcaggctct

SEQ ID NO: 105 - DNA, 23 bp, Artificial Sequence
  Primer 35R
  misc_feature: synthetic
ctcggtggaggagtgcaggctct

SEQ ID NO: 106 - DNA, 23 bp, Artificial Sequence
  Primer 36R
  misc_feature: synthetic
gtcggtggaggagtgcaggctct

SEQ ID NO: 107 - DNA, 23 bp, Artificial Sequence
  Primer 37R
  misc_feature: synthetic
tacggtggaggagtgcaggctct

SEQ ID NO: 108 - DNA, 23 bp, Artificial Sequence
  Primer 38R
  misc_feature: synthetic
aacggtggaggagtgcaggctct

SEQ ID NO: 109 - DNA, 23 bp, Artificial Sequence
  Primer 39R
  misc_feature: synthetic
cacggtggaggagtgcaggctct

SEQ ID NO: 110 - DNA, 23 bp, Artificial Sequence
  Primer 40R
  misc_feature: synthetic
gacggtggaggagtgcaggctct

SEQ ID NO: 111 - DNA, 23 bp, Artificial Sequence
  Primer 41R
  misc_feature: synthetic
tccggtggaggagtgcaggctct

SEQ ID NO: 112 - DNA, 23 bp, Artificial Sequence
  Primer 42R
  misc_feature: synthetic
accggtggaggagtgcaggctct

SEQ ID NO: 113 - DNA, 23 bp, Artificial Sequence
  Primer 43R
  misc_feature: synthetic
cccggtggaggagtgcaggctct

SEQ ID NO: 114 - DNA, 23 bp, Artificial Sequence
  Primer 44R
  misc_feature: synthetic
gccggtggaggagtgcaggctct

SEQ ID NO: 115 - DNA, 23 bp, Artificial Sequence
  Primer 45R
  misc_feature: synthetic
tgcggtggaggagtgcaggctct

SEQ ID NO: 116 - DNA, 23 bp, Artificial Sequence
  Primer 46R
  misc_feature: synthetic
agcggtggaggagtgcaggctct

SEQ ID NO: 117 - DNA, 23 bp, Artificial Sequence
  Primer 47R
  misc_feature: synthetic
cgcggtggaggagtgcaggctct

SEQ ID NO: 118 - DNA, 23 bp, Artificial Sequence
  Primer 48R
  misc_feature: synthetic
ggcggtggaggagtgcaggctct

SEQ ID NO: 119 - DNA, 23 bp, Artificial Sequence
  Primer 49R
  misc_feature: synthetic
ttgggtggaggagtgcaggctct

SEQ ID NO: 120 - DNA, 23 bp, Artificial Sequence
  Primer 50R
  misc_feature: synthetic
atgggtggaggagtgcaggctct

SEQ ID NO: 121 - DNA, 23 bp, Artificial Sequence
  Primer 51R
  misc_feature: synthetic
ctgggtggaggagtgcaggctct

SEQ ID NO: 122 - DNA, 23 bp, Artificial Sequence
  Primer 52R
  misc_feature: synthetic
gtgggtggaggagtgcaggctct

SEQ ID NO: 123 - DNA, 23 bp, Artificial Sequence
  Primer 53R
  misc_feature: synthetic
tagggtggaggagtgcaggctct

SEQ ID NO: 124 - DNA, 23 bp, Artificial Sequence
  Primer 54R
  misc_feature: synthetic
aagggtggaggagtgcaggctct

SEQ ID NO: 125 - DNA, 23 bp, Artificial Sequence
  Primer 55R
  misc_feature: synthetic
cagggtggaggagtgcaggctct

SEQ ID NO: 126 - DNA, 23 bp, Artificial Sequence
  Primer 56R
  misc_feature: synthetic
gagggtggaggagtgcaggctct

SEQ ID NO: 127 - DNA, 23 bp, Artificial Sequence
  Primer 57R
  misc_feature: synthetic
tcgggtggaggagtgcaggctct

SEQ ID NO: 128 - DNA, 23 bp, Artificial Sequence
  Primer 58R
  misc_feature: synthetic
acgggtggaggagtgcaggctct

SEQ ID NO: 129 - DNA, 23 bp, Artificial Sequence
  Primer 59R
  misc_feature: synthetic
ccgggtggaggagtgcaggctct

SEQ ID NO: 130 - DNA, 23 bp, Artificial Sequence
  Primer 60R
  misc_feature: synthetic
gcgggtggaggagtgcaggctct

SEQ ID NO: 131 - DNA, 23 bp, Artificial Sequence
  Primer 61R
  misc_feature: synthetic
tggggtggaggagtgcaggctct

SEQ ID NO: 132 - DNA, 23 bp, Artificial Sequence
  Primer 62R
  misc_feature: synthetic
aggggtggaggagtgcaggctct

SEQ ID NO: 133 - DNA, 23 bp, Artificial Sequence
  Primer 63R
  misc_feature: synthetic
cggggtggaggagtgcaggctct

SEQ ID NO: 134 - DNA, 23 bp, Artificial Sequence
  Primer 64R
  misc_feature: synthetic
gggggtggaggagtgcaggctct

SEQ ID NO: 135 - DNA, 23 bp, Artificial Sequence
  Primer 1L
  misc_feature: synthetic
ttttagaaactcgtagagtccca

SEQ ID NO: 136 - DNA, 23 bp, Artificial Sequence
  Primer 2L
  misc_feature: synthetic
atttagaaactcgtagagtccca

SEQ ID NO: 137 - DNA, 23 bp, Artificial Sequence
  Primer 3L
  misc_feature: synthetic
ctttagaaactcgtagagtccca

SEQ ID NO: 138 - DNA, 23 bp, Artificial Sequence
  Primer 4L
  misc_feature: synthetic
gtttagaaactcgtagagtccca

SEQ ID NO: 139 - DNA, 23 bp, Artificial Sequence
  Primer 5L
  misc_feature: synthetic
tattagaaactcgtagagtccca

SEQ ID NO: 140 - DNA, 23 bp, Artificial Sequence
  Primer 6L
  misc_feature: synthetic
aattagaaactcgtagagtccca

SEQ ID NO: 141 - DNA, 23 bp, Artificial Sequence
  Primer 7L
  misc_feature: synthetic
cattagaaactcgtagagtccca

SEQ ID NO: 142 - DNA, 23 bp, Artificial Sequence
  Primer 8L
  misc_feature: synthetic
gattagaaactcgtagagtccca

SEQ ID NO: 143 - DNA, 23 bp, Artificial Sequence
  Primer 9L
  misc_feature: synthetic
tcttagaaactcgtagagtccca

SEQ ID NO: 144 - DNA, 23 bp, Artificial Sequence
  Primer 10L
  misc_feature: synthetic
acttagaaactcgtagagtccca

SEQ ID NO: 145 - DNA, 23 bp, Artificial Sequence
  Primer 11L
  misc_feature: synthetic
ccttagaaactcgtagagtccca

SEQ ID NO: 146 - DNA, 23 bp, Artificial Sequence
  Primer 12L
  misc_feature: synthetic
gcttagaaactcgtagagtccca

SEQ ID NO: 147 - DNA, 23 bp, Artificial Sequence
  Primer 13L
  misc_feature: synthetic
tgttagaaactcgtagagtccca

SEQ ID NO: 148 - DNA, 23 bp, Artificial Sequence
  Primer 14L
  misc_feature: synthetic
agttagaaactcgtagagtccca

SEQ ID NO: 149 - DNA, 23 bp, Artificial Sequence
  Primer 15L
  misc_feature: synthetic
cgttagaaactcgtagagtccca

SEQ ID NO: 150 - DNA, 23 bp, Artificial Sequence
  Primer 16L
  misc_feature: synthetic
ggttagaaactcgtagagtccca

SEQ ID NO: 151 - DNA, 23 bp, Artificial Sequence
  Primer 17L
  misc_feature: synthetic
ttatagaaactcgtagagtccca

SEQ ID NO: 152 - DNA, 23 bp, Artificial Sequence
  Primer 18L
  misc_feature: synthetic
atatagaaactcgtagagtccca

SEQ ID NO: 153 - DNA, 23 bp, Artificial Sequence
  Primer 19L
  misc_feature: synthetic
ctatagaaactcgtagagtccca

SEQ ID NO: 154 - DNA, 23 bp, Artificial Sequence
  Primer 20L
  misc_feature: synthetic
gtatagaaactcgtagagtccca

SEQ ID NO: 155 - DNA, 23 bp, Artificial Sequence
  Primer 21L
  misc_feature: synthetic
taatagaaactcgtagagtccca

SEQ ID NO: 156 - DNA, 23 bp, Artificial Sequence
  Primer 22L
  misc_feature: synthetic
aaatagaaactcgtagagtccca

SEQ ID NO: 157 - DNA, 23 bp, Artificial Sequence
  Primer 23L
  misc_feature: synthetic
caatagaaactcgtagagtccca

SEQ ID NO: 158 - DNA, 23 bp, Artificial Sequence
  Primer 24L
  misc_feature: synthetic
gaatagaaactcgtagagtccca

SEQ ID NO: 159 - DNA, 23 bp, Artificial Sequence
  Primer 25L
  misc_feature: synthetic
tcatagaaactcgtagagtccca

SEQ ID NO: 160 - DNA, 23 bp, Artificial Sequence
  Primer 26L
  misc_feature: synthetic
acatagaaactcgtagagtccca

SEQ ID NO: 161 - DNA, 23 bp, Artificial Sequence
  Primer 27L
  misc_feature: synthetic
ccatagaaactcgtagagtccca

SEQ ID NO: 162 - DNA, 23 bp, Artificial Sequence
  Primer 28L
  misc_feature: synthetic
gcatagaaactcgtagagtccca

SEQ ID NO: 163 - DNA, 23 bp, Artificial Sequence
  Primer 29L
  misc_feature: synthetic
tgatagaaactcgtagagtccca

SEQ ID NO: 164 - DNA, 23 bp, Artificial Sequence
  Primer 30L
  misc_feature: synthetic
agatagaaactcgtagagtccca

SEQ ID NO: 165 - DNA, 23 bp, Artificial Sequence
  Primer 31L
  misc_feature: synthetic
cgatagaaactcgtagagtccca

SEQ ID NO: 166 - DNA, 23 bp, Artificial Sequence
  Primer 32L
  misc_feature: synthetic
ggatagaaactcgtagagtccca

SEQ ID NO: 167 - DNA, 23 bp, Artificial Sequence
  Primer 33L
  misc_feature: synthetic
ttctagaaactcgtagagtccca

SEQ ID NO: 168 - DNA, 23 bp, Artificial Sequence
  Primer 34L
  misc_feature: synthetic
atctagaaactcgtagagtccca

SEQ ID NO: 169 - DNA, 23 bp, Artificial Sequence
  Primer 35L
  misc_feature: synthetic
ctctagaaactcgtagagtccca

SEQ ID NO: 170 - DNA, 23 bp, Artificial Sequence
  Primer 36L
  misc_feature: synthetic
gtctagaaactcgtagagtccca

SEQ ID NO: 171 - DNA, 23 bp, Artificial Sequence
  Primer 37L
  misc_feature: synthetic
tactagaaactcgtagagtccca

SEQ ID NO: 172 - DNA, 23 bp, Artificial Sequence
  Primer 38L
  misc_feature: synthetic
aactagaaactcgtagagtccca

SEQ ID NO: 173 - DNA, 23 bp, Artificial Sequence
  Primer 39L
  misc_feature: synthetic
cactagaaactcgtagagtccca

SEQ ID NO: 174 - DNA, 23 bp, Artificial Sequence
  Primer 40L
  misc_feature: synthetic
gactagaaactcgtagagtccca

SEQ ID NO: 175 - DNA, 23 bp, Artificial Sequence
  Primer 41L
  misc_feature: synthetic
tcctagaaactcgtagagtccca

SEQ ID NO: 176 - DNA, 23 bp, Artificial Sequence
  Primer 42L
  misc_feature: synthetic
acctagaaactcgtagagtccca

SEQ ID NO: 177 - DNA, 23 bp, Artificial Sequence
  Primer 43L
  misc_feature: synthetic
ccctagaaactcgtagagtccca

SEQ ID NO: 178 - DNA, 23 bp, Artificial Sequence
  Primer 44L
  misc_feature: synthetic
gcctagaaactcgtagagtccca

SEQ ID NO: 179 - DNA, 23 bp, Artificial Sequence
  Primer 45L
  misc_feature: synthetic
tgctagaaactcgtagagtccca

SEQ ID NO: 180 - DNA, 23 bp, Artificial Sequence
  Primer 46L
  misc_feature: synthetic
agctagaaactcgtagagtccca

SEQ ID NO: 181 - DNA, 23 bp, Artificial Sequence
  Primer 47L
  misc_feature: synthetic
cgctagaaactcgtagagtccca

SEQ ID NO: 182 - DNA, 23 bp, Artificial Sequence
  Primer 48L
  misc_feature: synthetic
ggctagaaactcgtagagtccca

SEQ ID NO: 183 - DNA, 23 bp, Artificial Sequence
  Primer 49L
  misc_feature: synthetic
ttgtagaaactcgtagagtccca

SEQ ID NO: 184 - DNA, 23 bp, Artificial Sequence
  Primer 50L
  misc_feature: synthetic
atgtagaaactcgtagagtccca

SEQ ID NO: 185 - DNA, 23 bp, Artificial Sequence
  Primer 51L
  misc_feature: synthetic
ctgtagaaactcgtagagtccca

SEQ ID NO: 186 - DNA, 23 bp, Artificial Sequence
  Primer 52L
  misc_feature: synthetic
gtgtagaaactcgtagagtccca

SEQ ID NO: 187 - DNA, 23 bp, Artificial Sequence
  Primer 53L
  misc_feature: synthetic
tagtagaaactcgtagagtccca

SEQ ID NO: 188 - DNA, 23 bp, Artificial Sequence
  Primer 54L
  misc_feature: synthetic
aagtagaaactcgtagagtccca

SEQ ID NO: 189 - DNA, 23 bp, Artificial Sequence
  Primer 55L
  misc_feature: synthetic
cagtagaaactcgtagagtccca

SEQ ID NO: 190 - DNA, 23 bp, Artificial Sequence
  Primer 56L
  misc_feature: synthetic
gagtagaaactcgtagagtccca

SEQ ID NO: 191 - DNA, 23 bp, Artificial Sequence
  Primer 57L
  misc_feature: synthetic
tcgtagaaactcgtagagtccca

SEQ ID NO: 192 - DNA, 23 bp, Artificial Sequence
  Primer 58L
  misc_feature: synthetic
acgtagaaactcgtagagtccca

SEQ ID NO: 193 - DNA, 23 bp, Artificial Sequence
  Primer 59L
  misc_feature: synthetic
ccgtagaaactcgtagagtccca

SEQ ID NO: 194 - DNA, 23 bp, Artificial Sequence
  Primer 60L
  misc_feature: synthetic
gcgtagaaactcgtagagtccca

SEQ ID NO: 195 - DNA, 24 bp, Artificial Sequence
  Primer 61L
  misc_feature: synthetic
ctggtagaaactcgtagagtccca

SEQ ID NO: 196 - DNA, 23 bp, Artificial Sequence
  Primer 62L
  misc_feature: synthetic
aggtagaaactcgtagagtccca

SEQ ID NO: 197 - DNA, 23 bp, Artificial Sequence
  Primer 63L
  misc_feature: synthetic
cggtagaaactcgtagagtccca

SEQ ID NO: 198 - DNA, 23 bp, Artificial Sequence
  Primer 64L
  misc_feature: synthetic
gggtagaaactcgtagagtccca

SEQ ID NO: 199 - DNA, 60 bp, Artificial Sequence
  Spacer gap N14
  misc_feature: synthetic
ctctagaaactcgtagagtcccatgtctgcggcttccagagcctgcactcctccaccttg

SEQ ID NO: 200 - DNA, 61 bp, Artificial Sequence
  Spacer gap N15
  misc_feature: synthetic
ctctagaaactcgtagagtcccatgtctgccggcttccagagcctgcactcctccaccttg

SEQ ID NO: 201 - DNA, 62 bp, Artificial Sequence
  Spacer gap N16
  misc_feature: synthetic
ctctagaaactcgtagagtcccatgtctgcacggcttccagagcctgcactcctccaccttg

SEQ ID NO: 202 - DNA, 63 bp, Artificial Sequence
  Spacer gap N17
  misc_feature: synthetic
ctctagaaactcgtagagtcccatgtctgcaccggcttccagagcctgcactcctccaccttg

SEQ ID NO: 203 - DNA, 71 bp, Artificial Sequence
  Spacer gap N25
  misc_feature: synthetic
ctctagaaactcgtagagtcccatgtctgccactgcagtgaggcttccagagcctgcactcctccaccttg

SEQ ID NO: 204 - DNA, 72 bp, Artificial Sequence
  Spacer gap N26
  misc_feature: synthetic
ctctagaaactcgtagagtcccatgtctgccactgtcagtgaggcttccagagcctgcactcctccaccttg

SEQ ID NO: 205 - DNA, 73 bp, Artificial Sequence
  Spacer gap N27
  misc_feature: synthetic
ctctagaaactcgtagagtcccatgtctgccactgtacagtgaggcttccagagcctgcactcctccaccttg

SEQ ID NO: 206 - protein, 16 aa, Artificial Sequence
  dCasX-FokI (default linker)
  misc_feature: synthetic
SGSETPGTSESATPES

SEQ ID NO: 207 - protein, 25 aa, Artificial Sequence
  Linker dCasX-FokI (longer linker)
  misc_feature: synthetic
SGSETPGTSESATPEGGSAGGTGGS

SEQ ID NO: 208 - protein, 10 aa, Artificial Sequence
  Linker dCasX-FokI (shorter linker, small flexible amino acids and uncharged)
  misc_feature: synthetic
GGSAGGSGSG

SEQ ID NO: 209 - protein, 15 aa, Artificial Sequence
  Linker dCasX-FokI (linker composed of small uncharged amino acids, and contains nuclear localization tag)
  misc_feature: synthetic
GGSAPKKKRKVGGTG

SEQ ID NO: 210 - protein, 1222 aa, Artificial Sequence; identical to SEQ ID NO: 45
  dCasX-FokI (default linker)
  misc_feature: synthetic

SEQ ID NO: 211 - protein, 1231 aa, Artificial Sequence
  dCasX-FokI (longer linker)
  misc_feature: synthetic
MAVTAPKKKRKVGGSGSQLVKSELEEKKSELRHKLKYVPHEYIELIEIARNSTQDRILEMKVMEFFMKVYGYRGKHLGGSRKPDGAIYTVGSPIDYGVIVDTKAYSGGYNLPIGQADEMQRYVEENQTRNKHINPNEWWKVYPSSVTEFKFLFVSGHFKGNYKAQLTRLNHITNCNGAVLSVEELLIGGEMIKAGTLTLEEVRRKFNNGEINFSGSETPGTSESATPEGGSAGGTGGSGTEKRINKIRKKLSADNATKPVSRSGPMKTLLVRVMTDDLKKRLEKRRKKPEVMPQVISNNAANNLRMLLDDYTKMKEAILQVYWQEFKDDHVGLMCKFAQPASKKIDQNKLKPEMDEKGNLTTAGFACSQCGQPLFVYKLEQVSEKGKAYTNYFGRCNVAEHEKLILLAQLKPEKDSDEAVTYSLGASKFGQRALDFYSIHVTKESTHPVKPLAQIAGNRYASGPVGKALSDACMGTIASFLSKYQDIIIEHQKVVKGNQKRLESLRELAGKENLEYPSVTLPPQPHTKEGVDAYNEVIARVRMWVNLNLWQKLKLSRDDAKPLLRLKGFPSFPVVERRENEVDWWNTINEVKKLIDAKRDMGRVFWSGVTAEKRNTILEGYNYLPNENDHKKREGSLENPKKPAKRQFGDLLLYLEKKYAGDWGKVFDEAWERIDKKIAGLTSHIEREEARNAEDAQSKAVLTDWLRAKASFVLERLKEMDEKEFYACEIQLQKWYGDLRGNPFAVEAENRVVDISAFSIGSDGHSIQYRNLLAWKYLENGKREFYLLMNYGKKGRIRFTDGTDIKKSGKWQGLLYGGGKAKVIDLTFDPDDEQLIILPLAFGTRQGREFIWNDLLSLETGLIKLANGRVIEKTIYNKKIGRDEPALFVALTFERREVVDPSNIKPVNLIGVARGENIPAVIATLDPEGCPLPEFKDSSGGPTDILRIGEGYKEKQRAIQAAKEVEQRRAGGYSRKFASKSRNLADDMVRNSARDLFYHAVTHDAVLVFANLSRGFGRQGKRTFMTERQYTKMEDWLTAKLAYEGLTSKTYLSKTLAQYTSKTCSNCGFTITTADYDGMLVRLKKTSDGWATTLNNKELKAEGQITYYNRYKRQTVEKELSAELDRLSEESGNNDISKWTKGRRDEALFLLKKRFSHGSRPVQEQFVCLDCGHEVHAAEQAALNIARSWLFLNSNSTEFKSYKSGKQPFVGAWQAFYKRRLKEVWKPNAGA

SEQ ID NO: 212 - protein, 1216 aa, Artificial Sequence
  dCasX-FokI (shorter linker, small flexible amino acids and uncharged)
  misc_feature: synthetic
MAVTAPKKKRKVGGSGSQLVKSELEEKKSELRHKLKYVPHEYIELIEIARNSTQDRILEMKVMEFFMKVYGYRGKHLGGSRKPDGAIYTVGSPIDYGVIVDTKAYSGGYNLPIGQADEMQRYVEENQTRNKHINPNEWWKVYPSSVTEFKFLFVSGHFKGNYKAQLTRLNHITNCNGAVLSVEELLIGGEMIKAGTLTLEEVRRKFNNGEINFGGSAGGSGSGGTEKRINKIRKKLSADNATKPVSRSGPMKTLLVRVMTDDLKKRLEKRRKKPEVMPQVISNNAANNLRMLLDDYTKMKEAILQVYWQEFKDDHVGLMCKFAQPASKKIDQNKLKPEMDEKGNLTTAGFACSQCGQPLFVYKLEQVSEKGKAYTNYFGRCNVAEHEKLILLAQLKPEKDSDEAVTYSLGASKFGQRALDFYSIHVTKESTHPVKPLAQIAGNRYASGPVGKALSDACMGTIASFLSKYQDIIIEHQKVVKGNQKRLESLRELAGKENLEYPSVTLPPQPHTKEGVDAYNEVIARVRMWVNLNLWQKLKLSRDDAKPLLRLKGFPSFPVVERRENEVDWWNTINEVKKLIDAKRDMGRVFWSGVTAEKRNTILEGYNYLPNENDHKKREGSLENPKKPAKRQFGDLLLYLEKKYAGDWGKVFDEAWERIDKKIAGLTSHIEREEARNAEDAQSKAVLTDWLRAKASFVLERLKEMDEKEFYACEIQLQKWYGDLRGNPFAVEAENRVVDISAFSIGSDGHSIQYRNLLAWKYLENGKREFYLLMNYGKKGRIRFTDGTDIKKSGKWQGLLYGGGKAKVIDLTFDPDDEQLIILPLAFGTRQGREFIWNDLLSLETGLIKLANGRVIEKTIYNKKIGRDEPALFVALTFERREVVDPSNIKPVNLIGVARGENIPAVIATLDPEGCPLPEFKDSSGGPTDILRIGEGYKEKQRAIQAAKEVEQRRAGGYSRKFASKSRNLADDMVRNSARDLFYHAVTHDAVLVFANLSRGFGRQGKRTFMTERQYTKMEDWLTAKLAYEGLTSKTYLSKTLAQYTSKTCSNCGFTITTADYDGMLVRLKKTSDGWATTLNNKELKAEGQITYYNRYKRQTVEKELSAELDRLSEESGNNDISKWTKGRRDEALFLLKKRFSHGSRPVQEQFVCLDCGHEVHAAEQAALNIARSWLFLNSNSTEFKSYKSGKQPFVGAWQAFYKRRLKEVWKPNAGA

SEQ ID NO: 213 - protein, 1221 aa, Artificial Sequence
  dCasX-FokI (linker composed of small uncharged amino acids, and contains nuclear localization tag)
  misc_feature: synthetic
MAVTAPKKKRKVGGSGSQLVKSELEEKKSELRHKLKYVPHEYIELIEIARNSTQDRILEMKVMEFFMKVYGYRGKHLGGSRKPDGAIYTVGSPIDYGVIVDTKAYSGGYNLPIGQADEMQRYVEENQTRNKHINPNEWWKVYPSSVTEFKFLFVSGHFKGNYKAQLTRLNHITNCNGAVLSVEELLIGGEMIKAGTLTLEEVRRKFNNGEINFGGSAPKKKRKVGGTGGTEKRINKIRKKLSADNATKPVSRSGPMKTLLVRVMTDDLKKRLEKRRKKPEVMPQVISNNAANNLRMLLDDYTKMKEAILQVYWQEFKDDHVGLMCKFAQPASKKIDQNKLKPEMDEKGNLTTAGFACSQCGQPLFVYKLEQVSEKGKAYTNYFGRCNVAEHEKLILLAQLKPEKDSDEAVTYSLGASKFGQRALDFYSIHVTKESTHPVKPLAQIAGNRYASGPVGKALSDACMGTIASFLSKYQDIIIEHQKVVKGNQKRLESLRELAGKENLEYPSVTLPPQPHTKEGVDAYNEVIARVRMWVNLNLWQKLKLSRDDAKPLLRLKGFPSFPVVERRENEVDWWNTINEVKKLIDAKRDMGRVFWSGVTAEKRNTILEGYNYLPNENDHKKREGSLENPKKPAKRQFGDLLLYLEKKYAGDWGKVFDEAWERIDKKIAGLTSHIEREEARNAEDAQSKAVLTDWLRAKASFVLERLKEMDEKEFYACEIQLQKWYGDLRGNPFAVEAENRVVDISAFSIGSDGHSIQYRNLLAWKYLENGKREFYLLMNYGKKGRIRFTDGTDIKKSGKWQGLLYGGGKAKVIDLTFDPDDEQLIILPLAFGTRQGREFIWNDLLSLETGLIKLANGRVIEKTIYNKKIGRDEPALFVALTFERREVVDPSNIKPVNLIGVARGENIPAVIATLDPEGCPLPEFKDSSGGPTDILRIGEGYKEKQRAIQAAKEVEQRRAGGYSRKFASKSRNLADDMVRNSARDLFYHAVTHDAVLVFANLSRGFGRQGKRTFMTERQYTKMEDWLTAKLAYEGLTSKTYLSKTLAQYTSKTCSNCGFTITTADYDGMLVRLKKTSDGWATTLNNKELKAEGQITYYNRYKRQTVEKELSAELDRLSEESGNNDISKWTKGRRDEALFLLKKRFSHGSRPVQEQFVCLDCGHEVHAAEQAALNIARSWLFLNSNSTEFKSYKSGKQPFVGAWQAFYKRRLKEVWKPNAGA

SEQ ID NO: 214 - DNA, 361 bp, Homo sapiens
  misc_feature: Human RHO gene exon 1 sequence PRO23HIS mutation
atgaatggcacagaaggccctaacttctacgtgcccttctccaatgcgacgggtgtggtacgcagccacttcgagtacccacagtactacctggctgagccatggcagttctccatgctggccgcctacatgtttctgctgatcgtgctgggcttccccatcaacttcctcacgctctacgtcaccgtccagcacaagaagctgcgcacgcctctcaactacatcctgctcaacctagccgtggctgacctcttcatggtcctaggtggcttcaccagcaccctctacacctctctgcatggatacttcgtcttcgggcccacaggatgcaatttggagggcttctttgccaccctgggcg

SEQ ID NO: 215 - RNA, 96 nt, Artificial Sequence
  dScCas9-FokI RHO ASL1 SCNA
  misc_feature: synthetic
cauuggagaagggcacguagguuuuagagcuagaaauagcaaguuaaaauaaggcuaguccguuaucaacuugaaaaaguggcaccgagucggugc

SEQ ID NO: 216 - RNA, 96 nt, Artificial Sequence
  dScCas9-FokI RHO SR1 SCNA
  misc_feature: synthetic
gcagccacuucgaguacccaguuuuagagcuagaaauagcaaguuaaaauaaggcuaguccguuaucaacuugaaaaaguggcaccgagucggugc

SEQ ID NO: 217 - RNA, 96 nt, Artificial Sequence
  dScCas9-FokI RHO ASL2 SCNA
  misc_feature: synthetic
uguggguacucgaaguggcuguuuuagagcuagaaauagcaaguuaaaauaaggcuaguccguuaucaacuugaaaaaguggcaccgagucggugc

SEQ ID NO: 218 - RNA, 96 nt, Artificial Sequence
  dScCas9-FokI RHO SR2 SCNA
  misc_feature: synthetic
gccauggcaguucuccaugcguuuuagagcuagaaauagcaaguuaaaauaaggcuaguccguuaucaacuugaaaaaguggcaccgagucggugc

SEQ ID NO: 219 - DNA, 179 bp, Homo sapiens
  misc_feature: Human COMP gene exon 13, deletion in ASP 469
ggatggagacggacatcaggactctcgggacaactgtcccacggtgcctaacagtgcccaggaggactcagaccacgatggccagggtgatgcctgcgacgacgacgacaatgacggagtccctgacagtcgggacaactgccgcctggtgcctaaccccggccaggaggacgcggaca

SEQ ID NO: 220 - RNA, 96 nt, Artificial Sequence
  dScCas9-FokI COMP ASL1 SCNA
  misc_feature: synthetic
aucguggucugaguccuccuguuuuagagcuagaaauagcaaguuaaaauaaggcuaguccguuaucaacuugaaaaaguggcaccgagucggugc

SEQ ID NO: 221 - RNA, 96 nt, Artificial Sequence
  dScCas9-FokI COMP SR1 SCNA
  misc_feature: synthetic
ugcgacgacgacgacaaugaguuuuagagcuagaaauagcaaguuaaaauaaggcuaguccguuaucaacuugaaaaaguggcaccgagucggugc

SEQ ID NO: 222 - DNA, 76 bp, Homo sapiens
  misc_feature: Human PDCD1 gene exon 1
atgcagatcccacaggcgccctggccagtcgtctgggcggtgctacaactgggctggcggccaggatggttcttag

SEQ ID NO: 223 - RNA, 96 nt, Artificial Sequence
  dScCas9-FokI PDCD1 ASL1 SCNA
  misc_feature: synthetic
ggccagggcgccugugggauguuuuagagcuagaaauagcaaguuaaaauaaggcuaguccguuaucaacuugaaaaaguggcaccgagucggugc

SEQ ID NO: 224 - DNA, 96 bp, Artificial Sequence
  dScCas9-FokI PDCD1 SR1 SCNA
  misc_feature: synthetic
gctacaactgggctggcggcguuuuagagcuagaaauagcaaguuaaaauaaggcuaguccguuaucaacuugaaaaaguggcaccgagucggugc

SEQ ID NO: 225 - RNA, 96 nt, Artificial Sequence
  dScCas9-FokI PDCD1 ASL2 SCNA
  misc_feature: synthetic
cgacuggccagggcgccuguguuuuagagcuagaaauagcaaguuaaaauaaggcuaguccguuaucaacuugaaaaaguggcaccgagucggugc

SEQ ID NO: 226 - RNA, 96 nt, Artificial Sequence
  dScCas9-FokI PDCD1 SR2 SCNA
  misc_feature: synthetic
cuggcggccaggaugguucuguuuuagagcuagaaauagcaaguuaaaauaaggcuaguccguuaucaacuugaaaaaguggcaccgagucggugc

SEQ ID NO: 227 - DNA, 109 bp, Homo sapiens
  misc_feature: synthetic
atggcttgccttggatttcagcggcacaaggctcagctgaacctggctaccaggacctggccctgcactctcctgttttttcttctcttcatccctgtcttctgcaaag

SEQ ID NO: 228 - DNA, 96 bp, Artificial Sequence
  dScCas9-FokI CTL4 ASL1 SCNA
  misc_feature: synthetic
gtgccgctgaaatccaaggcguuuuagagcuagaaauagcaaguuaaaauaaggcuaguccguuaucaacuugaaaaaguggcaccgagucggugc

SEQ ID NO: 229 - DNA, 96 bp, Artificial Sequence
  dScCas9-FokI CTL4 SR1 SCNA
  misc_feature: synthetic
ctggctaccaggacctggccguuuuagagcuagaaauagcaaguuaaaauaaggcuaguccguuaucaacuugaaaaaguggcaccgagucggugc

SEQ ID NO: 230 - DNA, 96 bp, Artificial Sequence
  dScCas9-FokI CTL4 ASL2 SCNA
  misc_feature: synthetic
caggtcctggtagccaggttguuuuagagcuagaaauagcaaguuaaaauaaggcuaguccguuaucaacuugaaaaaguggcaccgagucggugc

SEQ ID NO: 231 - DNA, 96 bp, Artificial Sequence
  Guuuuuucuucucuucauccguuuuagagcuagaaauagcaaguuaaaauaaggcuaguccguua ucaacuugaaaaaguggcaccgagucggugc
  misc_feature: synthetic
gttttttcttctcttcatccguuuuagagcuagaaauagcaaguuaaaauaaggcuaguccguuaucaacuugaaaaaguggcaccgagucggugc

SEQ ID NO: 232 - DNA, 87 bp, Homo sapiens
  misc_feature: Human Siglec-10 gene exon 1
caggcaggccctgcgcctcctatgcggagatgctactgccactgctgctgtcctcgctgctgggcggtgagtgggccaagggccgga

SEQ ID NO: 233 - DNA, 96 bp, Artificial Sequence; identical to SEQ ID NO: 231
  dScCas9-FokI Siglec-10 ASL1 SCNA
  misc_feature: synthetic

SEQ ID NO: 234 - DNA, 96 bp, Artificial Sequence; identical to SEQ ID NO: 231
  dScCas9-FokI Siglec-10 SR1 SCNA
  misc_feature: synthetic

SEQ ID NO: 235 - DNA, 96 bp, Artificial Sequence
  dScCas9-FokI Siglec-10 ASL2 SCNA
  misc_feature: synthetic
gcatctccgcataggaggcgguuuuagagcuagaaauagcaaguuaaaauaaggcuaguccguuaucaacuugaaaaaguggcaccgagucggugc

SEQ ID NO: 236 - DNA, 96 bp, Artificial Sequence; identical to SEQ ID NO: 235
  dScCas9-FokI Siglec-10 SR2 SCNA
  misc_feature: synthetic

SEQ ID NO: 237 - DNA, 96 bp, Artificial Sequence
  dScCas9-FokI Siglec-10 ASL3 SCNA
  misc_feature: synthetic
gtagcatctccgcataggagguuuuagagcuagaaauagcaaguuaaaauaaggcuaguccguuaucaacuugaaaaaguggcaccgagucggugc

SEQ ID NO: 238 - DNA, 96 bp, Artificial Sequence; identical to SEQ ID NO: 237
  dScCas9-FokI Siglec-10 SR3 SCNA
  misc_feature: synthetic

SEQ ID NO: 239 - DNA, 96 bp, Artificial Sequence
  dScCas9-FokI Siglec-10 ASL4 SCNA
  misc_feature: synthetic
gtggcagtagcatctccgcaguuuuagagcuagaaauagcaaguuaaaauaaggcuaguccguuaucaacuugaaaaaguggcaccgagucggugc

SEQ ID NO: 240 - DNA, 96 bp, Artificial Sequence
  dScCas9-FokI Siglec-10 SR4 SCNA
  misc_feature: synthetic
tgctgggcggtgagtgggccguuuuagagcuagaaauagcaaguuaaaauaaggcuaguccguuaucaacuugaaaaaguggcaccgagucggugc

SEQ ID NO: 241 - DNA, 96 bp, Artificial Sequence
  dScCas9-FokI Siglec-10 ASL5 SCNA
  misc_feature: synthetic
cagcagtggcagtagcatctguuuuagagcuagaaauagcaaguuaaaauaaggcuaguccguuaucaacuugaaaaaguggcaccgagucggugc

SEQ ID NO: 242 - DNA, 96 bp, Artificial Sequence
  dScCas9-FokI Siglec-10 SR5 SCNA
  misc_feature: synthetic
ggcggtgagtgggccaagggguuuuagagcuagaaauagcaaguuaaaauaaggcuaguccguuaucaacuugaaaaaguggcaccgagucggugc

SEQ ID NO: 243 - DNA, 104 bp, Bos taurus
  misc_feature: Bovine ITGB3 gene exon 1
gacgagatgcgagcgcggcggctctgggcagcggtgctggtggtgggggcgctggcgggcgtcggcgtcggaggtgagtggggctcccgcgcggtggggaccca

SEQ ID NO: 244 - DNA, 96 bp, Artificial Sequence
  dScCas9-FokI ITGB3 ASL1 SCNA
  misc_feature: synthetic
gctgcccagagccgccgcgcguuuuagagcuagaaauagcaaguuaaaauaaggcuaguccguuaucaacuugaaaaaguggcaccgagucggugc

SEQ ID NO: 245 - DNA, 96 bp, Artificial Sequence
  dScCas9-FokI ITGB3 SR1 SCNA
  misc_feature: synthetic
ggcgcuggcgggcgucggcgguuuuagagcuagaaauagcaaguuaaaauaaggcuaguccguuaucaacuugaaaaaguggcaccgagucggugc

SEQ ID NO: 246 - RNA, 96 nt, Artificial Sequence
  dScCas9-FokI ITGB3 ASL2 SCNA
  misc_feature: synthetic
caccgcugcccagagccgccguuuuagagcuagaaauagcaaguuaaaauaaggcuaguccguuaucaacuugaaaaaguggcaccgagucggugc

SEQ ID NO: 247 - RNA, 96 nt, Artificial Sequence
  dScCas9-FokI ITGB3 SR2 SCNA
  misc_feature: synthetic
cuggcgggcgucggcgucggguuuuagagcuagaaauagcaaguuaaaauaaggcuaguccguuaucaacuugaaaaaguggcaccgagucggugc

SEQ ID NO: 248 - RNA, 96 nt, Artificial Sequence
  dScCas9-FokI ITGB3 ASL3 SCNA
  misc_feature: synthetic
agcaccgcugcccagagccgguuuuagagcuagaaauagcaaguuaaaauaaggcuaguccguuaucaacuugaaaaaguggcaccgagucggugc

SEQ ID NO: 249 - RNA, 96 nt, Artificial Sequence
  dScCas9-FokI ITGB3 SR3 SCNA
  misc_feature: synthetic
ggcgggcgucggcgucggagguuuuagagcuagaaauagcaaguuaaaauaaggcuaguccguuaucaacuugaaaaaguggcaccgagucggugc

SEQ ID NO: 250 - RNA, 96 nt, Artificial Sequence
  dScCas9-FokI ITGB3 ASL4 SCNA
  misc_feature: synthetic
accaccagcaccgcugcccaguuuuagagcuagaaauagcaaguuaaaauaaggcuaguccguuaucaacuugaaaaaguggcaccgagucggugc

SEQ ID NO: 251 - RNA, 96 nt, Artificial Sequence
  dScCas9-FokI ITGB3 SR4 SCNA
  misc_feature: synthetic
cgucggcgucggaggugaguguuuuagagcuagaaauagcaaguuaaaauaaggcuaguccguuaucaacuugaaaaaguggcaccgagucggugc

SEQ ID NO: 252 - RNA, 96 nt, Artificial Sequence
  dScCas9-FokI ITGB3 ASL5 SCNA
  misc_feature: synthetic
cgcccccaccaccagcaccgguuuuagagcuagaaauagcaaguuaaaauaaggcuaguccguuaucaacuugaaaaaguggcaccgagucggugc

SEQ ID NO: 253 - DNA, 96 bp, Artificial Sequence
  dScCas9-FokI ITGB3 SR5 SCNA
  misc_feature: synthetic
gtcggaggtgagtggggctcguuuuagagcuagaaauagcaaguuaaaauaaggcuaguccguuaucaacuugaaaaaguggcaccgagucggugc

SEQ ID NO: 254 - DNA, 2768 bp, Homo sapiens
  misc_feature: Homo sapiens rhodopsin (RHO), mRNA, NM_000539
agagtcatccagctggagccctgagtggctgagctcaggccttcgcagcattcttgggtgggagcagccacgggtcagccacaagggccacagccatgaatggcacagaaggccctaacttctacgtgcccttctccaatgcgacgggtgtggtacgcagccccttcgagtacccacagtactacctggctgagccatggcagttctccatgctggccgcctacatgtttctgctgatcgtgctgggcttccccatcaacttcctcacgctctacgtcaccgtccagcacaagaagctgcgcacgcctctcaactacatcctgctcaacctagccgtggctgacctcttcatggtcctaggtggcttcaccagcaccctctacacctctctgcatggatacttcgtcttcgggcccacaggatgcaatttggagggcttctttgccaccctgggcggtgaaattgccctgtggtccttggtggtcctggccatcgagcggtacgtggtggtgtgtaagcccatgagcaacttccgcttcggggagaaccatgccatcatgggcgttgccttcacctgggtcatggcgctggcctgcgccgcacccccactcgccggctggtccaggtacatccccgagggcctgcagtgctcgtgtggaatcgactactacacgctcaagccggaggtcaacaacgagtcttttgtcatctacatgttcgtggtccacttcaccatccccatgattatcatctttttctgctatgggcagctcgtcttcaccgtcaaggaggccgctgcccagcagcaggagtcagccaccacacagaaggcagagaaggaggtcacccgcatggtcatcatcatggtcatcgctttcctgatctgctgggtgccctacgccagcgtggcattctacatcttcacccaccagggctccaacttcggtcccatcttcatgaccatcccagcgttctttgccaagagcgccgccatctacaaccctgtcatctatatcatgatgaacaagcagttccggaactgcatgctcaccaccatctgctgcggcaagaacccactgggtgacgatgaggcctctgctaccgtgtccaagacggagacgagccaggtggccccggcctaagacctgcctaggactctgtggccgactataggcgtctcccatcccctacaccttcccccagccacagccatcccaccaggagcagcgcctgtgcagaatgaacgaagtcacataggctccttaattttttttttttttttaagaaataattaatgaggctcctcactcacctgggacagcctgagaagggacatccaccaagacctactgatctggagtcccacgttccccaaggccagcgggatgtgtgcccctcctcctcccaactcatctttcaggaacacgaggattcttgctttctggaaaagtgtcccagcttagggataagtgtctagcacagaatggggcacacagtaggtgcttaataaatgctggatggatgcaggaaggaatggaggaatgaatgggaagggagaacatatctatcctctcagaccctcgcagcagcagcaactcatacttggctaatgatatggagcagttgtttttccctccctgggcctcactttcttctcctataaaatggaaatcccagatccctggtcctgccgacacgcagctactgagaagaccaaaagaggtgtgtgtgtgtctatgtgtgtgtttcagcactttgtaaatagcaagaagctgtacagattctagttaatgttgtgaataacatcaattaatgtaactagttaattactatgattatcacctcctgatagtgaacattttgagattgggcattcagatgatggggtttcacccaaccttggggcaggtttttaaaaattagctaggcatcaaggccagaccagggctgggggttgggctgtaggcagggacagtcacaggaatgcagaatgcagtcatcagacctgaaaaaacaacactgggggagggggacggtgaaggccaagttcccaatgagggtgagattgggcctggggtctcacccctagtgtggggccccaggtcccgtgcctccccttcccaatgtggcctatggagagacaggcctttctctcagcctctggaagccacctgctcttttgctctagcacctgggtcccagcatctagagcatggagcctctagaagccatgctcacccgcccacatttaattaacagctgagtccctgatgtcatccttatctcgaagagcttagaaacaaagagtgggaaattccactgggcctaccttccttggggatgttcatgggccccagtttccagtttcccttgccagacaagcccatcttcagcagttgctagtccattctccattctggagaatctgctccaaaaagctggccacatctctgaggtgtcagaattaagctgcctcagtaactgctcccccttctccatataagcaaagccagaagctctagctttacccagctctgcctggagactaaggcaaattgggccattaaaagctcagctcctatgttggtattaacggtggtgggttttgttgctttcacactctatccacaggatagattgaaactgccagcttccacctgatccctgaccctgggatggctggattgagcaatgagcagagccaagcagcacagagtcccctggggctagaggtggaggaggcagtcctgggaatgggaaaaacccca

SEQ ID NO: 255 - protein, 348 aa, Homo sapiens [sequence omitted]

SEQ ID NO: 256 - protein, 194 aa, Flavobacterium okeanokoites
  MISC_FEATURE: FokI
VKSELEEKKSELRHKLKYVPHEYIELIEIARNSTQDRILEMKVMEFFMKVYGYRGKHLGGSRKPDGAIYTVGSPIDYGVIVDTKAYSGGYNLPIGQADEMQRYVEENQTRNKHINPNEWWKVYPSSVTEFKFLFVSGHFKGNYKAQLTRLNHITNCNGAVLSVEELLIGGEMIKAGTLTLEEVRRKFNNGEINF

SEQ ID NO: 257 - protein, 1368 aa, Streptococcus pyogenes [sequence omitted]

SEQ ID NO: 258 - protein, 1375 aa, Streptococcus canis
  MISC_FEATURE: Sc Cas9
MEKKYSIGLDIGTNSVGWAVITDDYKVPSKKFKVLGNTNRKSIKKNLMGALLFDSGETAEATRLKRTARRRYTRRKNRIRYLQEIFANEMAKLDDSFFQRLEESFLVEEDKKNERHPIFGNLADEVAYHRNYPTIYHLRKKLADSPEKADLRLIYLALAHIIKFRGHFLIEGKLNAENSDVAKLFYQLIQTYNQLFEESPLDEIEVDAKGILSARLSKSKRLEKLIAVFPNEKKNGLFGNIIALALGLTPNFKSNFDLTEDAKLQLSKDTYDDDLDELLGQIGDQYADLFSAAKNLSDAILLSDILRSNSEVTKAPLSASMVKRYDEHHQDLALLKTLVRQQFPEKYAEIFKDDTKNGYAGYVGIGIKHRKRTTKLATQEEFYKFIKPILEKMDGAEELLAKLNRDDLLRKQRTFDNGSIPHQIHLKELHAILRRQEEFYPFLKENREKIEKILTFRIPYYVGPLARGNSRFAWLTRKSEEAITPWNFEEVVDKGASAQSFIERMTNFDEQLPNKKVLPKHSLLYEYFTVYNELTKVKYVTERMRKPEFLSGEQKKAIVDLLFKTNRKVTVKQLKEDYFKKIECFDSVEIIGVEDRFNASLGTYHDLLKIIKDKDFLDNEENEDILEDIVLTLTLFEDREMIEERLKTYAHLFDDKVMKQLKRRHYTGWGRLSRKMINGIRDKQSGKTILDFLKSDGFSNRNFMQLIHDDSLTFKEEIEKAQVSGQGDSLHEQIADLAGSPAIKKGILQTVKIVDELVKVMGHKPENIVIEMARENQTTTKGLQQSRERKKRIEEGIKELESQILKENPVENTQLQNEKLYLYYLQNGRDMYVDQELDINRLSDYDVDHIVPQSFIKDDSIDNKVLTRSVENRGKSDNVPSEEVVKKMKNYWRQLLNAKLITQRKFDNLTKAERGGLSEADKAGFIKRQLVETRQITKHVARILDSRMNTKRDKNDKPIREVKVITLKSKLVSDFRKDFQLYKVRDINNYHHAHDAYLNAVVGTALIKKYPKLESEFVYGDYKVYDVRKMIAKSEQEIGKATAKRFFYSNIMNFFKTEVKLANGEIRKRPLIETNGETGEVVWNKEKDFATVRKVLAMPQVNIVKKTEVQTGGFSKESILSKRESAKLIPRKKGWDTRKYGGFGSPTVAYSILVVAKVEKGKAKKLKSVKVLVGITIMEKGSYEKDPIGFLEAKGYKDIKKELIFKLPKYSLFELENGRRRMLASATELQKANELVLPQHLVRLLYYTQNISATTGSNNLGYIEQHREEFKEIFEKIIDFSEKYILKNKVNSNLKSSFDEQFAVSDSILLSNSFVSLLKYTSFGASGGFTFLDLDVKQGRLRYQTVTEVLDATLIYQSITGLYETRTDLSQLGGD

SEQ ID NO: 259 - protein, 46 aa, Escherichia coli
  MISC_FEATURE: E. coli Lac repressor fragment 1-46
MKPVTLYDVAEYAGVSYQTVSRVVNQASHVSAKTREKVEAAMAELN

SEQ ID NO: 260 - protein, 52 aa, Human immunodeficiency virus
  MISC_FEATURE: HIV integrase fragment 219-270
MIQNFRVYYRDSRNPLWKGPAKLLWKGEGAVVIQDNSDIKVVPRRKAKIIRD

SEQ ID NO: 261 - protein, 64 aa, Sulfolobus solfataricus
  MISC_FEATURE: Residues 1 to 64 of the Sso7D DNA-binding protein of Sulfolobus solfataricus
MATVKFKYKGEEKEVDISKIKKVWRVGKMISFTYDEGGGKTGRGAVSEKDAPKELLQMLEKQKK

SEQ ID NO: 262 - protein, 64 aa, Sulfolobus tokodaii
  MISC_FEATURE: residues 1 to 64 of the Sto7D DNA-binding protein from Sulfolobus tokodaii
MVTVKFKYKGEEKEVDISKIKKVWRVGKMISFTYDDNGKTGRGAVSEKDAPKELLQMLEKSGKK

SEQ ID NO: 263 - protein, 74 aa, Arabidopsis thaliana
  MISC_FEATURE: StkC domain comprise residues 232-305 of Arabidopsis MBD7 methyl-CpG-binding domain
SVSMVHSERLPLLMNRNGIRFQSEVIDPNPPKKVKWVLTGSGGNMFTANVRGSNVSSLVKHTWSEAFVSLIEDR

SEQ ID NO: 264 - protein, 73 aa, Homo sapiens
  MISC_FEATURE: human HMG4. Comprising residues 2 to 79 of human HMGB4
SDKPKRPLSAYMLWLNSARESIKRENPGIKVTEVAKRGGELWRAMKDKSEWEAKAAKAKDDYDRAVKEFEANG

SEQ ID NO: 265 - protein, 25 aa, Mus musculus
  MISC_FEATURE: Testis zinc finger 3 (non-specific zinc finger)
APYRCPCRAGCPSLASMQAHMRGHS

SEQ ID NO: 266 - protein, 1339 aa, Artificial Sequence
  dScCas9-FokI-StkC2
  misc_feature: synthetic
MEKKYSIGLAIGTNSVGWAVITDDYKVPSKKFKVLGNTNRKSIKKNLMGALLFDSGETAEATRLKRTARRRYTRRKNRIRYLQEIFANEMAKLDDSFFQRLEESFLVEEDKKNERHPIFGNLADEVAYHRNYPTIYHLRKKLADSPEKADLRLIYLALAHIIKFRGHFLIEGKLNAENSDVAKLFYQLIQTYNQLFEESPLDEIEVDAKGILSARLSKSKRLEKLIAVFPNEKKNGLFGNIIALALGLTPNFKSNFDLTEDAKLQLSKDTYDDDLDELLGQIGDQYADLFSAAKNLSDAILLSDILRSNSEVTKAPLSASMVKRYDEHHQDLALLKTLVRQQFPEKYAEIFKDDTKNGYAGYVGIGIKHRKRTTKLATQEEFYKFIKPILEKMDGAEELLAKLNRDDLLRKQRTFDNGSIPHQIHLKELHAILRRQEEFYPFLKENREKIEKILTFRIPYYVGPLARGNSRFAWLTRKSEEAITPWNFEEVVDKGASAQSFIERMTNFDEQLPNKKVLPKHSLLYEYFTVYNELTKVKYVTERMRKPEFLSGEQKKAIVDLLFKTNRKVTVKQLKEDYFKKIECFDSVEIIGVEDRFNASLGTYHDLLKIIKDKDFLDNEENEDILEDIVLTLTLFEDREMIEERLKTYAHLFDDKVMKQLKRRHYTGWGRLSRKMINGIRDKQSGKTILDFLKSDGFSNRNFMQLIHDDSLTFKEEIEKAQVSGQGDSLHEQIADLAGSPAIKKGILQTVKIVDELVKVMGHKPENIVIEMARENQTTTKGLQQSRERKKRIEEGIKELESQILKENPVENTQLQNEKLYLYYLQNGRDMYVDQELDINRLSDYDVDAIVPQSFIKDDSIDNKVLTRSVENRGKSDNVPSEEVVKKMKNYWRQLLNAKLITQRKFDNLTKAERGGLSEADKAGFIKRQLVETRQITKHVARILDSRMNTKRDKNDKPIREVKVITLKSKLVSDFRKDFQLYKVRDINNYHHAHDAYLNAVVGTALIKKYPKLESEFVYGDYKVYDVRKMIAKSEQEIGKATAKRFFYSNIMNFFKTEVKLANGEIRKRPLIETNGETGEVVWNKEKDFATVRKVLAMPQVNIVKKTEVQTGGFSKESILSKRESAKLIPRKKGWDTRKYGGFGSPTVAYSILVVAKVEKGKAKKLKSVKVLVGITIMEKGSYEKDPIGFLEAKGYKDIKKELIFKLPKYSLFELENGRRRMLASATELQKASVSMVHSERLPLLMNRNGIRFQSEVIDPNPPKKVKWVLTGSGGNMFTANVRGSNVSSLVKHTWSEAFVSLIEDRYQTVTEVLDATLIYQSITGLYETRTDLSQLGGD

SEQ ID NO: 267 - protein, 1435 aa, Artificial Sequence
  dScCas9-FokI-HMGB4
  misc_feature: synthetic
MEKKYSIGLAIGTNSVGWAVITDDYKVPSKKFKVLGNTNRKSIKKNLMGALLFDSGETAEATRLKRTARRRYTRRKNRIRYLQEIFANEMAKLDDSFFQRLEESFLVEEDKKNERHPIFGNLADEVAYHRNYPTIYHLRKKLADSPEKADLRLIYLALAHIIKFRGHFLIEGKLNAENSDVAKLFYQLIQTYNQLFEESPLDEIEVDAKGILSARLSKSKRLEKLIAVFPNEKKNGLFGNIIALALGLTPNFKSNFDLTEDAKLQLSKDTYDDDLDELLGQIGDQYADLFSAAKNLSDAILLSDILRSNSEVTKAPLSASMVKRYDEHHQDLALLKTLVRQQFPEKYAEIFKDDTKNGYAGYVGIGIKHRKRTTKLATQEEFYKFIKPILEKMDGAEELLAKLNRDDLLRKQRTFDNGSIPHQIHLKELHAILRRQEEFYPFLKENREKIEKILTFRIPYYVGPLARGNSRFAWLTRKSEEAITPWNFEEVVDKGASAQSFIERMTNFDEQLPNKKVLPKHSLLYEYFTVYNELTKVKYVTERMRKPEFLSGEQKKAIVDLLFKTNRKVTVKQLKEDYFKKIECFDSVEIIGVEDRFNASLGTYHDLLKIIKDKDFLDNEENEDILEDIVLTLTLFEDREMIEERLKTYAHLFDDKVMKQLKRRHYTGWGRLSRKMINGIRDKQSGKTILDFLKSDGFSNRNFMQLIHDDSLTFKEEIEKAQVSGQGDSLHEQIADLAGSPAIKKGILQTVKIVDELVKVMGHKPENIVIEMARENQTTTKGLQQSRERKKRIEEGIKELESQILKENPVENTQLQNEKLYLYYLQNGRDMYVDQELDINRLSDYDVDAIVPQSFIKDDSIDNKVLTRSVENRGKSDNVPSEEVVKKMKNYWRQLLNAKLITQRKFDNLTKAERGGLSEADKAGFIKRQLVETRQITKHVARILDSRMNTKRDKNDKPIREVKVITLKSKLVSDFRKDFQLYKVRDINNYHHAHDAYLNAVVGTALIKKYPKLESEFVYGDYKVYDVRKMIAKSEQEIGKATAKRFFYSNIMNFFKTEVKLANGEIRKRPLIETNGETGEVVWNKEKDFATVRKVLAMPQVNIVKKTEVQTGGFSKESILSKRESAKLIPRKKGWDTRKYGGFGSPTVAYSILVVAKVEKGKAKKLKSVKVLVGITIMEKGSYEKDPIGFLEAKGYKDIKKELIFKLPKYSLFELENGRRRMLASATELQKANELVLPQHLVRLLYYTQNISATTGSNNLGYIEQHREEFKEIFEKIIDFSEKYILKNKVNSNLKSSFDEQFAVSDSILLSNSFVSLLKYTSFGASGGFSDKPKRPLSAYMLWLNSARESIKRENPGIKVTEVAKRGGELWRAMKDKSEWEAKAAKAKDDYDRAVKEFEANGYQTVTEVLDATLIYQSITGLYETRTDLSQLGGD

SEQ ID NO: 268 - protein, 1375 aa, Artificial Sequence
  Ancestral Cas9
  misc_feature: synthetic
MDKKYSIGLDIGTNSVGWAVITDDYKVPSKKMKVLGNTDRQSIKKNLIGALLFDSGETAEATRLKRTARRRYTRRKNRICYLQEIFANEMAKLDDSFFHRLEESFLVEEDKKHERHPIFGNLVDEVAYHENYPTIYHLRKKLADSTEKADLRLIYLALAHMIKFRGHFLIEGDLNAENSDVDKLFIQLVQTYNQLFEENPINESGVDAKAILSARLSKSRRLENLIAQFPGEKKNGLFGNIIALALGLTPNFKSNFDLTEDAKLQLSKDTYDDDLDELLGQIGDQYADLFLAAKNLSDAILLSDILRVNSEITKAPLSASMVKRYDEHHQDLALLKTLVRQQLPEKYKEIFSDQSKNGYAGYIDIGIKHRKRTTKRTSQEEFYKFIKPILEKMDGAEELLAKLNREDLLRKQRTFDNGSIPHQIHLGELHAILRRQEEFYPFLKDNREKIEKILTFRIPYYVGPLARGNSRFAWMTRKSDEAITPWNFEEVVDKGASAQSFIERMTNFDEYLPNKKVLPKHSLLYEYFTVYNELTKVKYVTEGMRKPEFLSGEQKEAIVDLLFKTNRKVTVKQLKEDYFKKIECFDSVEIIGVEDRFNASLGTYHDLLKIIKDKDFLDNEENEDILEDIVLTLTLFEDREMIEERLKKYANLFDDKVMKQLKRRHYTGWGRLSRKMINGIRDKQSGKTILDFLKSDGFSNRNFMQLIHDDSLTFKEEIEKAQVSGQGDSLHEQIADLAGSPAIKKGILQTVKIVDELVKVMGHKPENIVIEMARENQTTQKGQKNSRERMKRIEEGIKELGSQILKEHPVENTQLQNEKLYLYYLQNGKDMYTGDELDINRLYQYDVDHIIPQSFIKDNSIDNKVLTSSKENRGKSDDVPSEEVVKKMKNYWRQLLNAKLITQRKFDNLTKAERGGLSEADKAGFIKRQLVETRQITKHVAQILDSRMNTKRDKNDKPIREVKVITLKSKLVSDFRKDFQLYKVREINNYHHAHDAYLNAVVGTALIKKYPKLESEFVYGDYKVYDVRKMIAKSEQEIGKATAKRFFYSNIMNFFKTEVKLANGEIRKRPLIETNEETGEIVWDKEKDFATVRKVLSMPQVNIVKKTEVQTGGFSKESILSKGESDKLIPRKKGWDSKKYGGFGSPTVAYSVLVVAKVEKGKAKKLKTVKELVGITIMEKSSFEKDPIGFLEAKGYKDIQKDLIIKLPKYSLFELENGRRRMLASATELQKANELVLPQHLVTLLYHAHKIESSKESENQAYIEQHRHEFDEILEYIIDFSEKYILAEKNISKVKSLFNKQFEDSDISELSNSFINLLTLTSFGAPAAFKFLDTTIKQGRKRYQSTKEVLDATLIHQSITGLYETRTDLSQLGGD

SEQ ID NO: 269 - protein, 986 aa, Artificial Sequence
  synthetic
  MISC_FEATURE: CasX
  misc_feature: synthetic
  misc_feature: Planctomycetes CasX
MEKRINKIRKKLSADNATKPVSRSGPMKTLLVRVMTDDLKKRLEKRRKKPEVMPQVISNNAANNLRMLLDDYTKMKEAILQVYWQEFKDDHVGLMCKFAQPASKKIDQNKLKPEMDEKGNLTTAGFACSQCGQPLFVYKLEQVSEKGKAYTNYFGRCNVAEHEKLILLAQLKPEKDSDEAVTYSLGKFGQRALDFYSIHVTKESTHPVKPLAQIAGNRYASGPVGKALSDACMGTIASFLSKYQDIIIEHQKVVKGNQKRLESLRELAGKENLEYPSVTLPPQPHTKEGVDAYNEVIARVRMWVNLNLWQKLKLSRDDAKPLLRLKGFPSFPVVERRENEVDWWNTINEVKKLIDAKRDMGRVFWSGVTAEKRNTILEGYNYLPNENDHKKREGSLENPKKPAKRQFGDLLLYLEKKYAGDWGKVFDEAWERIDKKIAGLTSHIEREEARNAEDAQSKAVLTDWLRAKASFVLERLKEMDEKEFYACEIQLQKWYGDLRGNPFAVEAENRVVDISGFSIGSDGHSIQYRNLLAWKYLENGKREFYLLMNYGKKGRIRFTDGTDIKKSGKWQGLLYGGGKAKVIDLTFDPDDEQLIILPLAFGTRQGREFIWNDLLSLETGLIKLANGRVIEKTIYNKKIGRDEPALFVALTFERREVVDPSNIKPVNLIGVDRGENIPAVIALTDPEGCPLPEFKDSSGGPTDILRIGEGYKEKQRAIQAAKEVEQRRAGGYSRKFASKSRNLADDMVRNSARDLFYHAVTHDAVLVFENLSRGFGRQGKRTFMTERQYTKMEDWLTAKLAYEGLTSKTYLSKTLAQYTSKTCSNCGFTITTADYDGMLVRLKKTSDGWATTLNNKELKAEGQITYYNRYKRQTVEKELSAELDRLSEESGNNDISKWTKGRRDEALFLLKKRFSHRPVQEQFVCLDCGHEVHADEQAALNIARSWLFLNSNSTEFKSYKSGKQPFVGAWQAFYKRRLKEVWKPNA

SEQ ID NO: 270 - DNA, 7959 bp, Artificial Sequence
  Plasmid construct 11235, expression dScCas9-FokI-NNG
  misc_feature: synthetic
ctaaattgtaagcgttaatattttgttaaaattcgcgttaaatttttgttaaatcagctcattttttaaccaataggccgaaatcggcaaaatcccttataaatcaaaagaatagaccgagatagggttgagtggccgctacagggcgctcccattcgccattcaggctgcgcaactgttgggaagggcgtttcggtgcgggcctcttcgctattacgccagctggcgaaagggggatgtgctgcaaggcgattaagttgggtaacgccagggttttcccagtcacgacgttgtaaaacgacggccagtgagcgcgacgtaatacgactcactatagggcgaattgaaggaaggccgtcaaggccgcatatagtaatcaattacggggtcattagttcatagcccatatatggagttccgcgttacataacttacggtaaatggcccgcctggctgaccgcccaacgacccccgcccattgacgtcaataatgacgtatgttcccatagtaacgccaatagggactttccattgacgtcaatgggtggagtatttacggtaaactgcccacttggcagtacatcaagtgtatcatatgccaagtacgccccctattgacgtcaatgacggtaaatggcccgcctggcattatgcccagtacatgaccttatgggactttcctacttggcagtacatctacgtattagtcatcgctattaccatggtgatgcggttttggcagtacatcaatgggcgtggatagcggtttgactcacggggatttccaagtctccaccccattgacgtcaatgggagtttgttttggcaccaaaatcaacgggactttccaaaatgtcgtaacaactccgccccattgacgcaaatgggcggtaggcgtgtacggtgggaggtctatataagcagagctggtttagtgaaccgtcagatccgctagcgctaccggtatggcccctaagaagaagagaaaagtcggcggctctggcagccagctggtcaagtctgagctggaagagaagaaaagcgagctgcggcacaagctgaaatacgtgccccacgagtacatcgagctgatcgagatcgccagaaacagcacccaggacagaatcctggaaatgaaggtcatggaattctttatgaaggtgtacggctaccggggcaagcacctcggaggatctagaaagcctgacggcgccatctataccgtgggcagccctatcgattacggcgtgatcgtggataccaaggcctacagcggcggctacaatctgcctattggacaggccgacgagatgcagagatacgtggaagaaaaccagacacggaacaagcacatcaaccccaacgagtggtggaaagtgtaccccagcagcgtgaccgagttcaagttcctgttcgtgtccggccacttcaagggcaactacaaggcccagctgacccggctgaaccacatcacaaattgcaacggcgctgtgctgtctgtggaagaactgctgatcggcggcgagatgatcaaggccggaacactgacactggaagaagtgcggcggaagttcaacaacggcgagatcaacttcagcggcagcgagacacctggcacatctgaatctgccacacctgagagcatggaaaagaagtacagcatcggcctggccatcggcacaaattctgttggctgggccgtgatcaccgacgactacaaggtgcccagcaagaaattcaaggtgctgggcaacaccaaccggaagtccatcaagaaaaacctgatgggcgccctgctgttcgattctggcgaaacagccgaggccaccagactgaagagaaccgccagaagaagatacacccggcggaagaaccggatcagatacctgcaagagatcttcgccaacgagatggccaagctggacgacagcttctttcagagactggaagagtccttcctggtggaagaggacaagaagaacgagcggcaccccatcttcggcaatctggctgatgaggtggcctaccacagaaactaccccaccatctaccacctgaggaagaagctggccgactctcctgagaaggccgacctgagactgatctatctggccctggctcacatcatcaagttccggggccacttcctgatcgagggcaagctgaatgccgagaacagcgacgtggccaaactgttctaccagctgatccagacctacaaccagctgttcgaggaaagccctctggacgagattgaggtggacgccaagggaatcctgagcgccagactgagcaagagcaagcggctggaaaagctgatcgccgtgtttcccaacgagaagaagaatggcctgttcggcaacatcattgccctggcactgggcctgacacctaacttcaagtccaacttcgacctgaccgaggacgccaaactgcagctgagcaaggacacctacgacgacgatctggatgagctgctgggccagatcggagatcagtacgccgatctgttcagcgccgccaagaatctgtctgacgccatcctgctgagcgacatcctgagatccaacagcgaagtgacaaaggcccctctgagcgcctccatggtcaagagatatgacgagcaccaccaggacctggctctgctgaaaacccttgtgcggcagcagttccccgagaagtatgccgagatcttcaaggacgacaccaagaacggctacgccggctatgttggcatcggcatcaagcacagaaagcggaccaccaagctggccacacaagaggaattctacaagttcatcaagcccatcctcgagaagatggacggcgccgaagaactcctggctaagctgaacagggacgacctgctgcggaagcagagaaccttcgacaatggcagcatccctcaccagatccacctgaaagagctgcacgccattctgcggcggcaagaagagttctacccattcctgaaagaaaaccgggaaaagattgagaagatcctgaccttcaggatcccctactacgtgggaccactggccagaggcaatagcagattcgcttggctgaccagaaagagcgaggaagccatcacaccctggaacttcgaggaagtggtggataagggcgccagcgctcagtccttcatcgagcggatgaccaatttcgacgagcagctgcccaacaagaaggtgctgcctaagcacagcctgctgtacgagtacttcaccgtgtacaatgagctgaccaaagtcaaatacgtgacagagcggatgcggaagcctgagtttctgagcggcgagcagaaaaaggccatcgtggatctgctgttcaagaccaacagaaaagtgaccgtgaagcagctgaaagaggactacttcaagaaaatcgagtgcttcgacagcgtcgagatcatcggcgtggaagatagattcaacgccagcctgggcacataccacgatctgctgaagattatcaaggacaaggacttcctggacaacgaggaaaacgaggacatcctggaagatatcgtgctgaccctgacactgtttgaggacagagagatgatcgaggaacggctgaaaacatacgcccacctgttcgacgacaaagtgatgaagcaactgaagcggcggcactacacaggctggggcagactgtccagaaagatgattaacggcatccgggacaagcagagcggcaagaccatcctggactttctgaagtccgacggcttcagcaaccggaacttcatgcagctgattcacgacgacagcctcaccttcaaagaggaaatcgagaaggcccaggtttccggccagggcgattctctgcacgagcagattgctgatctggccggatctcccgccattaagaagggcatcctgcagacagtgaagatcgtggacgaactcgtgaaagtgatgggccacaagcctgagaacatcgtgatcgaaatggccagagagaaccagaccaccaccaagggcctgcagcagtccagagagagaaagaagcggatcgaagagggcatcaaagagctggaaagccagatcctcaaagagaaccccgtcgagaacacccagctgcagaacgagaagctgtacctgtactacctgcagaatggacgggatatgtacgtggaccaagaactggacatcaaccggctgtccgactacgatgtggatgccatcgtgccccagagcttcatcaaggatgacagcatcgacaacaaggtcctgaccagatccgtggaaaacagaggcaagagcgacaacgtgccctccgaagaggtggtcaagaagatgaagaattactggcgacagctgctgaacgccaagctgatcacccagagaaagttcgacaacctgaccaaggccgagagaggcggactgtctgaagctgataaggccggcttcattaagcggcagctggtggaaacccggcagatcacaaagcacgtggcccggatcctggacagcagaatgaacaccaagcgggacaagaacgacaagcctatccgggaagtgaaagtcatcaccctgaagtccaagctggtgtccgatttccggaaggatttccagctgtacaaagtgcgcgacatcaacaactaccatcacgcccacgacgcctacctgaatgctgttgtgggaacagccctgatcaagaagtaccctaagctggaatccgagttcgtgtacggcgactacaaagtgtacgacgtgcggaagatgatcgccaagagcgagcaagagattggcaaggccaccgccaagcggttcttctactccaacatcatgaactttttcaagaccgaagtgaagctcgccaacggcgaaatccggaagaggcccctgattgagacaaatggcgagacaggcgaggtcgtgtggaacaaagagaaggacttcgccaccgtgcggaaagtgctggccatgcctcaagtgaatatcgtgaaaaagaccgaggtgcagaccggcggcttctccaaagagagcatcctgtctaagagagagagcgccaagctcatccctcggaagaaaggctgggatacacggaagtacggcggatttggaagccctaccgtggcctactctattctggtggtggccaaggtggaaaagggcaaagccaagaaactgaagtctgtgaaggtgctcgtggggatcaccatcatggaaaaaggcagctacgagaaggaccctatcggctttctggaagccaagggctacaaggacatcaaaaaagagctgatctttaagctccccaagtacagcctgttcgaactggaaaacggcagacgcagaatgctggcctctgccacagaactgcagaaagccaatgaactggtgctgccacaacacctcgtgcggctgctgtactacacccagaatatcagcgccaccaccggcagcaacaacctgggatatatcgagcagcaccgggaagagttcaaagagattttcgagaaaatcatcgacttcagcgagaagtacatcctgaagaacaaagtgaacagcaacctcaagagcagcttcgatgagcagttcgccgtgtccgactctatcctgctgtctaacagcttcgtgtccctgctgaagtacacctcctttggcgcctctggcggcttcacctttctggatctggacgtgaaacaggggagactgagataccagaccgtgactgaggtgctggacgccactctgatctaccagagcatcaccggcctgtacgagacaagaaccgatctctctcagctcggaggcgactaaaagcttctgtgccttctagttgccagccatctgttgtttgcccctcccccgtgccttccttgaccctggaaggtgccactcccactgtcctttcctaataaaatgaggaaattgcatcgcattgtctgagtaggtgtcattctattctggggggtggggtggggcaggacagcaagggggaggattgggaagacaatagcaggcatgctggggatgcggtgggctctatggacaaacccacaactacgcgtacttgcggccgcatattcctaggatattctgggcctcatgggccttcctttcactgcccgctttccagtcgggaaacctgtcgtgccagctgcattaacatggtcatagctgtttccttgcgtattgggcgctctccgcttcctcgctcactgactcgctgcgctcggtcgttcgggtaaagcctggggtgcctaatgagcaaaaggccagcaaaaggccaggaaccgtaaaaaggccgcgttgctggcgtttttccataggctccgcccccctgacgagcatcacaaaaatcgacgctcaagtcagaggtggcgaaacccgacaggactataaagataccaggcgtttccccctggaagctccctcgtgcgctctcctgttccgaccctgccgcttaccggatacctgtccgcctttctcccttcgggaagcgtggcgctttctcatagctcacgctgtaggtatctcagttcggtgtaggtcgttcgctccaagctgggctgtgtgcacgaaccccccgttcagcccgaccgctgcgccttatccggtaactatcgtcttgagtccaacccggtaagacacgacttatcgccactggcagcagccactggtaacaggattagcagagcgaggtatgtaggcggtgctacagagttcttgaagtggtggcctaactacggctacactagaagaacagtatttggtatctgcgctctgctgaagccagttaccttcggaaaaagagttggtagctcttgatccggcaaacaaaccaccgctggtagcggtggtttttttgtttgcaagcagcagattacgcgcagaaaaaaaggatctcaagaagatcctttgatcttttctacggggtctgacgctcagtggaacgaaaactcacgttaagggattttggtcatgagattatcaaaaaggatcttcacctagatccttttaaattaaaaatgaagttttaaatcaatctaaagtatatatgagtaaacttggtctgacagttattagaaaaattcatccagcagacgataaaacgcaatacgctggctatccggtgccgcaatgccatacagcaccagaaaacgatccgcccattcgccgcccagttcttccgcaatatcacgggtggccagcgcaatatcctgataacgatccgccacgcccagacggccgcaatcaataaagccgctaaaacggccattttccaccataatgttcggcaggcacgcatcaccatgggtcaccaccagatcttcgccatccggcatgctcgctttcagacgcgcaaacagctctgccggtgccaggccctgatgttcttcatccagatcatcctgatccaccaggcccgcttccatacgggtacgcgcacgttcaatacgatgtttcgcctgatgatcaaacggacaggtcgccgggtccagggtatgcagacgacgcatggcatccgccataatgctcactttttctgccggcgccagatggctagacagcagatcctgacccggcacttcgcccagcagcagccaatcacggcccgcttcggtcaccacatccagcaccgccgcacacggaacaccggtggtggccagccagctcagacgcgccgcttcatcctgcagctcgttcagcgcaccgctcagatcggttttcacaaacagcaccggacgaccctgcgcgctcagacgaaacaccgccgcatcagagcagccaatggtctgctgcgcccaatcatagccaaacagacgttccacccacgctgccgggctacccgcatgcaggccatcctgttcaatcatactcttcctttttcaatattattgaagcatttatcagggttattgtctcatgagcggatacatatttgaatgtatttagaaaaataaacaaataggggttccgcgcacatttccccgaaaagtgccac

SEQ ID NO: 271 - protein, 760 aa, Artificial Sequence
  dCas14-FokI
  misc_feature: synthetic
MAVTAPKKKRKVGGSGSQLVKSELEEKKSELRHKLKYVPHEYIELIEIARNSTQDRILEMKVMEFFMKVYGYRGKHLGGSRKPDGAIYTVGSPIDYGVIVDTKAYSGGYNLPIGQADEMQRYVEENQTRNKHINPNEWWKVYPSSVTEFKFLFVSGHFKGNYKAQLTRLNHITNCNGAVLSVEELLIGGEMIKAGTLTLEEVRRKFNNGEINFSGSETPGTSESATPESGTMAKNTITKTLKLRIVRPYNSAEVEKIVADEKNNREKIALEKNKDKVKEACSKHLKVAAYCTTQVERNACLFCKARKLDDKFYQKLRGQFPDAVFWQEISEIFRQLQKQAAEIYNQSLIELYYEIFIKGKGIANASSVEHYLSDVCYTRAAELFKNAAIASGLRSKIKSNFRLKELKNMKSGLPTTKSDNFPIPLVKQKGGQYTGFEISNHNSDFIIKIPFGRWQVKKEIDKYRPWEKFDFEQVQKSPKPISLLLSTQRRKRNKGWSKDEGTEAEIKKVMNGDYQTSYIEVKRGSKICEKSAWMLNLSIDVPKIDKGVDPSIIGGIAVGVKSPLVCAINNAFSRYSISDNDLFHFNKKMFARRRILLKKNRHKRAGHGAKNKLKPITILTEKSERFRKKLIERWACEIADFFIKNKVGTVQMENLESMKRKEDSYFNIRLRGFWPYAEMQNKIEFKLKQYGIEIRKVAPNNTSKTCSKCGHLNNYFNFEYRKKNKFPHFKCEKCNFKENADYNAALNISNPKLKSTKEEP

SEQ ID NO: 272 - protein, 818 aa, Artificial Sequence
  StkC-dCas14-FokI
  misc_feature: synthetic
MAVTSVSMVHSERLPLLMNRNGIRFQSEVIDPNPPKKVKWVLTGSGGNMFTANVRGSNVSSLVKHTWSEAFVSLIEDRVKSELEEKKSELRHKLKYVPHEYIELIEIARNSTQDRILEMKVMEFFMKVYGYRGKHLGGSRKPDGAIYTVGSPIDYGVIVDTKAYSGGYNLPIGQADEMQRYVEENQTRNKHINPNEWWKVYPSSVTEFKFLFVSGHFKGNYKAQLTRLNHITNCNGAVLSVEELLIGGEMIKAGTLTLEEVRRKFNNGEINFSGSETPGTSESATPEGTMAKNTITKTLKLRIVRPYNSAEVEKIVADEKNNREKIALEKNKDKVKEACSKHLKVAAYCTTQVERNACLFCKARKLDDKFYQKLRGQFPDAVFWQEISEIFRQLQKQAAEIYNQSLIELYYEIFIKGKGIANASSVEHYLSDVCYTRAAELFKNAAIASGLRSKIKSNFRLKELKNMKSGLPTTKSDNFPIPLVKQKGGQYTGFEISNHNSDFIIKIPFGRWQVKKEIDKYRPWEKFDFEQVQKSPKPISLLLSTQRRKRNKGWSKDEGTEAEIKKVMNGDYQTSYIEVKRGSKICEKSAWMLNLSIDVPKIDKGVDPSIIGGIAVGVKSPLVCAINNAFSRYSISDNDLFHFNKKMFARRRILLKKNRHKRAGHGAKNKLKPITILTEKSERFRKKLIERWACEIADFFIKNKVGTVQMENLESMKRKEDSYFNIRLRGFWPYAEMQNKIEFKLKQYGIEIRKVAPNNTSKTCSKCGHLNNYFNFEYRKKNKFPHFKCEKCNFKENADYNAALNISNPKLKSTKEEP

SEQ ID NO: 273 - protein, 795 aa, Artificial Sequence
  HIVINT-dCas14-FokI
  misc_feature: synthetic
MAVTIQNFRVYYRDSRNPLWKGPAKLLWKGEGAWIQDNSDIKWPRRKAKIIRDVKSELEEKKSELRHKLKYVPHEYIELIEIARNSTQDRILEMKVMEFFMKVYGYRGKHLGGSRKPDGAIYTVGSPIDYGVIVDTKAYSGGYNLPIGQADEMQRYVEENQTRNKHINPNEWWKVYPSSVTEFKFLFVSGHFKGNYKAQLTRLNHITNCNGAVLSVEELLIGGEMIKAGTLTLEEVRRKFNNGEINFSGSETPKKKRKVPGTSEGTMAKNTITKTLKLRIVRPYNSAEVEKIVADEKNNREKIALEKNKDKVKEACSKHLKVAAYCTTQVERNACLFCKARKLDDKFYQKLRGQFPDAVFWQEISEIFRQLQKQAAEIYNQSLIELYYEIFIKGKGIANASSVEHYLSDVCYTRAAELFKNAAIASGLRSKIKSNFRLKELKNMKSGLPTTKSDNFPIPLVKQKGGQYTGFEISNHNSDFIIKIPFGRWQVKKEIDKYRPWEKFDFEQVQKSPKPISLLLSTQRRKRNKGWSKDEGTEAEIKKVMNGDYQTSYIEVKRGSKICEKSAWMLNLSIDVPKIDKGVDPSIIGGIAVGVKSPLVCAINNAFSRYSISDNDLFHFNKKMFARRRILLKKNRHKRAGHGAKNKLKPITILTEKSERFRKKLIERWACEIADFFIKNKVGTVQMENLESMKRKEDSYFNIRLRGFWPYAEMQNKIEFKLKQYGIEIRKVAPNNTSKTCSKCGHLNNYFNFEYRKKNKFPHFKCEKCNFKENADYNAALNISNPKLKSTKEEP

SEQ ID NO: 274 - protein, 810 aa, Artificial Sequence
  SS07D-dCas14-FokI
  misc_feature: synthetic
MAVTMATVKFKYKGEEKEVDISKIKKVWRVGKMISFTYDEGGGKTGRGAVSEKDAPKELLQMLEKQKKVKSELEEKKSELRHKLKYVPHEYIELIEIARNSTQDRILEMKVMEFFMKVYGYRGKHLGGSRKPDGAIYTVGSPIDYGVIVDTKAYSGGYNLPIGQADEMQRYVEENQTRNKHINPNEWWKVYPSSVTEFKFLFVSGHFKGNYKAQLTRLNHITNCNGAVLSVEELLIGGEMIKAGTLTLEEVRRKFNNGEINFSGSETPKKKRKVPGTSEGTMAKNTITKTLKLRIVRPYNSAEVEKIVADEKNNREKIALEKNKDKVKEACSKHLKVAAYCTTQVERNACLFCKARKLDDKFYQKLRGQFPDAVFWQEISEIFRQLQKQAAEIYNQSLIELYYEIFIKGKGIANASSVEHYLSDVCYTRAAELFKNAAIASGLRSKIKSNFRLKELKNMKSGLPTTKSDNFPIPLVKQKGGQYTGFEISNHNSDFIIKIPFGRWQVKKEIDKYRPWEKFDFEQVQKSPKPISLLLSTQRRKRNKGWSKDEGTEAEIKKVMNGDYQTSYIEVKRGSKICEKSAWMLNLSIDVPKIDKGVDPSIIGGIAVGVKSPLVCAINNAFSRYSISDNDLFHFNKKMFARRRILLKKNRHKRAGHGAKNKLKPITILTEKSERFRKKLIERWACEIADFFIKNKVGTVQMENLESMKRKEDSYFNIRLRGFWPYAEMQNKIEFKLKQYGIEIRKVAPNNTSKTCSKCGHLNNYFNFEYRKKNKFPHFKCEKCNFKENADYNAALNISNPKLKSTKEEP

SEQ ID NO: 275 - protein, 856 aa, Artificial Sequence
  HMGN-dCas14-FokI
  misc_feature: synthetic
MGPKKKRKVMPKRKVSSAEGAAKEEPKRRSARLSAKPPAKVEAKPKKAAAKDKSSDKKVQTKGKRGAKGKQAEVANQETKEDLPAENGETKTEESPASDEAGEKEAKSDPKKKRKVVKSELEEKKSELRHKLKYVPHEYIELIEIARNSTQDRILEMKVMEFFMKVYGYRGKHLGGSRKPDGAIYTVGSPIDYGVIVDTKAYSGGYNLPIGQADEMQRYVEENQTRNKHINPNEWWKVYPSSVTEFKFLFVSGHFKGNYKAQLTRLNHITNCNGAVLSVEELLIGGEMIKAGTLTLEEVRRKFNNGEINFSGSETPGTSESATPEGTMAKNTITKTLKLRIVRPYNSAEVEKIVADEKNNREKIALEKNKDKVKEACSKHLKVAAYCTTQVERNACLFCKARKLDDKFYQKLRGQFPDAVFWQEISEIFRQLQKQAAEIYNQSLIELYYEIFIKGKGIANASSVEHYLSDVCYTRAAELFKNAAIASGLRSKIKSNFRLKELKNMKSGLPTTKSDNFPIPLVKQKGGQYTGFEISNHNSDFIIKIPFGRWQVKKEIDKYRPWEKFDFEQVQKSPKPISLLLSTQRRKRNKGWSKDEGTEAEIKKVMNGDYQTSYIEVKRGSKICEKSAWMLNLSIDVPKIDKGVDPSIIGGIAVGVKSPLVCAINNAFSRYSISDNDLFHFNKKMFARRRILLKKNRHKRAGHGAKNKLKPITILTEKSERFRKKLIERWACEIADFFIKNKVGTVQMENLESMKRKEDSYFNIRLRGFWPYAEMQNKIEFKLKQYGIEIRKVAPNNTSKTCSKCGHLNNYFNFEYRKKNKFPHFKCEKCNFKENADYNAALNISNPKLKSTKEEP

SEQ ID NO: 276 - protein, 939 aa, Artificial Sequence
  HMGN-dCas14-FokI-HMGB1
  misc_feature: synthetic
MGPKKKRKVMPKRKVSSAEGAAKEEPKRRSARLSAKPPAKVEAKPKKAAAKDKSSDKKVQTKGKRGAKGKQAEVANQETKEDLPAENGETKTEESPASDEAGEKEAKSDPKKKRKVVKSELEEKKSELRHKLKYVPHEYIELIEIARNSTQDRILEMKVMEFFMKVYGYRGKHLGGSRKPDGAIYTVGSPIDYGVIVDTKAYSGGYNLPIGQADEMQRYVEENQTRNKHINPNEWWKVYPSSVTEFKFLFVSGHFKGNYKAQLTRLNHITNCNGAVLSVEELLIGGEMIKAGTLTLEEVRRKFNNGEINFSGSETPGTSESATPEGTMAKNTITKTLKLRIVRPYNSAEVEKIVADEKNNREKIALEKNKDKVKEACSKHLKVAAYCTTQVERNACLFCKARKLDDKFYQKLRGQFPDAVFWQEISEIFRQLQKQAAEIYNQSLIELYYEIFIKGKGIANASSVEHYLSDVCYTRAAELFKNAAIASGLRSKIKSNFRLKELKNMKSGLPTTKSDNFPIPLVKQKGGQYTGFEISNHNSDFIIKIPFGRWQVKKEIDKYRPWEKFDFEQVQKSPKPISLLLSTQRRKRNKGWSKDEGTEAEIKKVMNGDYQTSYIEVKRGSKICEKSAWMLNLSIDVPKIDKGVDPSIIGGIAVGVKSPLVCAINNAFSRYSISDNDLFHFNKKMFARRRILLKKNRHKRAGHGAKNKLKPITILTEKSERFRKKLIERWACEIADFFIKNKVGTVQMENLESMKRKEDSYFNIRLRGFWPYAEMQNKIEFKLKQYGIEIRKVAPNNTSKTCSKCGHLNNYFNFEYRKKNKFPHFKCEKCNFKENADYNAALNISNPKLKSTKEEPGKGDPKKPRGKMSSYAFFVQTCREEHKKKHPDASVNFSEFSKKCSERWKTMSAKEKGKFEDMAKADKARYEREMKTYIPPKGE

SEQ ID NO: 277 - protein, 942 aa, Artificial Sequence
  HMGN-dCas14-FokI-HMGB3
  misc_feature: synthetic
MGPKKKRKVMPKRKVSSAEGAAKEEPKRRSARLSAKPPAKVEAKPKKAAAKDKSSDKKVQTKGKRGAKGKQAEVANQETKEDLPAENGETKTEESPASDEAGEKEAKSDPKKKRKVVKSELEEKKSELRHKLKYVPHEYIELIEIARNSTQDRILEMKVMEFFMKVYGYRGKHLGGSRKPDGAIYTVGSPIDYGVIVDTKAYSGGYNLPIGQADEMQRYVEENQTRNKHINPNEWWKVYPSSVTEFKFLFVSGHFKGNYKAQLTRLNHITNCNGAVLSVEELLIGGEMIKAGTLTLEEVRRKFNNGEINFSGSETPGTSESATPEGTMAKNTITKTLKLRIVRPYNSAEVEKIVADEKNNREKIALEKNKDKVKEACSKHLKVAAYCTTQVERNACLFCKARKLDDKFYQKLRGQFPDAVFWQEISEIFRQLQKQAAEIYNQSLIELYYEIFIKGKGIANASSVEHYLSDVCYTRAAELFKNAAIASGLRSKIKSNFRLKELKNMKSGLPTTKSDNFPIPLVKQKGGQYTGFEISNHNSDFIIKIPFGRWQVKKEIDKYRPWEKFDFEQVQKSPKPISLLLSTQRRKRNKGWSKDEGTEAEIKKVMNGDYQTSYIEVKRGSKICEKSAWMLNLSIDVPKIDKGVDPSIIGGIAVGVKSPLVCAINNAFSRYSISDNDLFHFNKKMFARRRILLKKNRHKRAGHGAKNKLKPITILTEKSERFRKKLIERWACEIADFFIKNKVGTVQMENLESMKRKEDSYFNIRLRGFWPYAEMQNKIEFKLKQYGIEIRKVAPNNTSKTCSKCGHLNNYFNFEYRKKNKFPHFKCEKCNFKENADYNAALNISNPKLKSTKEEPGSSGSSGMAKGDPKKPKGKMSAYAFFVQTCREEHKKKNPEVPVNFAEFSKKCSERWKTMSGKEKSKFDEMAKADKVRYDREMKDYG

SEQ ID NO: 278 - protein, 934 aa, Artificial Sequence
  HMGN-dCas14-FokI-HMGB4
  misc_feature: synthetic
MGPKKKRKVMPKRKVSSAEGAAKEEPKRRSARLSAKPPAKVEAKPKKAAAKDKSSDKKVQTKGKRGAKGKQAEVANQETKEDLPAENGETKTEESPASDEAGEKEAKSDPKKKRKVVKSELEEKKSELRHKLKYVPHEYIELIEIARNSTQDRILEMKVMEFFMKVYGYRGKHLGGSRKPDGAIYTVGSPIDYGVIVDTKAYSGGYNLPIGQADEMQRYVEENQTRNKHINPNEWWKVYPSSVTEFKFLFVSGHFKGNYKAQLTRLNHITNCNGAVLSVEELLIGGEMIKAGTLTLEEVRRKFNNGEINFSGSETPGTSESATPEGTMAKNTITKTLKLRIVRPYNSAEVEKIVADEKNNREKIALEKNKDKVKEACSKHLKVAAYCTTQVERNACLFCKARKLDDKFYQKLRGQFPDAVFWQEISEIFRQLQKQAAEIYNQSLIELYYEIFIKGKGIANASSVEHYLSDVCYTRAAELFKNAAIASGLRSKIKSNFRLKELKNMKSGLPTTKSDNFPIPLVKQKGGQYTGFEISNHNSDFIIKIPFGRWQVKKEIDKYRPWEKFDFEQVQKSPKPISLLLSTQRRKRNKGWSKDEGTEAEIKKVMNGDYQTSYIEVKRGSKICEKSAWMLNLSIDVPKIDKGVDPSIIGGIAVGVKSPLVCAINNAFSRYSISDNDLFHFNKKMFARRRILLKKNRHKRAGHGAKNKLKPITILTEKSERFRKKLIERWACEIADFFIKNKVGTVQMENLESMKRKEDSYFNIRLRGFWPYAEMQNKIEFKLKQYGIEIRKVAPNNTSKTCSKCGHLNNYFNFEYRKKNKFPHFKCEKCNFKENADYNAALNISNPKLKSTKEEPGKEIQLKPKANVSSYVHFLLNYRNKFKEQQPNTYVGFKEFSRKCSEKWRSISKHEKAKYEALAKLDKARYQEEMMNYV

SEQ ID NO: 279 - protein, 843 aa, Artificial Sequence
  dCas14-FokI-HMGB1
  misc_feature: synthetic
MAVTAPKKKRKVGGSGSQLVKSELEEKKSELRHKLKYVPHEYIELIEIARNSTQDRILEMKVMEFFMKVYGYRGKHLGGSRKPDGAIYTVGSPIDYGVIVDTKAYSGGYNLPIGQADEMQRYVEENQTRNKHINPNEWWKVYPSSVTEFKFLFVSGHFKGNYKAQLTRLNHITNCNGAVLSVEELLIGGEMIKAGTLTLEEVRRKFNNGEINFSGSETPGTSESATPESGTMAKNTITKTLKLRIVRPYNSAEVEKIVADEKNNREKIALEKNKDKVKEACSKHLKVAAYCTTQVERNACLFCKARKLDDKFYQKLRGQFPDAVFWQEISEIFRQLQKQAAEIYNQSLIELYYEIFIKGKGIANASSVEHYLSDVCYTRAAELFKNAAIASGLRSKIKSNFRLKELKNMKSGLPTTKSDNFPIPLVKQKGGQYTGFEISNHNSDFIIKIPFGRWQVKKEIDKYRPWEKFDFEQVQKSPKPISLLLSTQRRKRNKGWSKDEGTEAEIKKVMNGDYQTSYIEVKRGSKICEKSAWMLNLSIDVPKIDKGVDPSIIGGIAVGVKSPLVCAINNAFSRYSISDNDLFHFNKKMFARRRILLKKNRHKRAGHGAKNKLKPITILTEKSERFRKKLIERWACEIADFFIKNKVGTVQMENLESMKRKEDSYFNIRLRGFWPYAEMQNKIEFKLKQYGIEIRKVAPNNTSKTCSKCGHLNNYFNFEYRKKNKFPHFKCEKCNFKENADYNAALNISNPKLKSTKEEPGKGDPKKPRGKMSSYAFFVQTCREEHKKKHPDASVNFSEFSKKCSERWKTMSAKEKGKFEDMAKADKARYEREMKTYIPPKGE

SEQ ID NO: 280 - protein, 846 aa, Artificial Sequence
  dCas14-FokI-HMGB3
  misc_feature: synthetic
MAVTAPKKKRKVGGSGSQLVKSELEEKKSELRHKLKYVPHEYIELIEIARNSTQDRILEMKVMEFFMKVYGYRGKHLGGSRKPDGAIYTVGSPIDYGVIVDTKAYSGGYNLPIGQADEMQRYVEENQTRNKHINPNEWWKVYPSSVTEFKFLFVSGHFKGNYKAQLTRLNHITNCNGAVLSVEELLIGGEMIKAGTLTLEEVRRKFNNGEINFSGSETPGTSESATPESGTMAKNTITKTLKLRIVRPYNSAEVEKIVADEKNNREKIALEKNKDKVKEACSKHLKVAAYCTTQVERNACLFCKARKLDDKFYQKLRGQFPDAVFWQEISEIFRQLQKQAAEIYNQSLIELYYEIFIKGKGIANASSVEHYLSDVCYTRAAELFKNAAIASGLRSKIKSNFRLKELKNMKSGLPTTKSDNFPIPLVKQKGGQYTGFEISNHNSDFIIKIPFGRWQVKKEIDKYRPWEKFDFEQVQKSPKPISLLLSTQRRKRNKGWSKDEGTEAEIKKVMNGDYQTSYIEVKRGSKICEKSAWMLNLSIDVPKIDKGVDPSIIGGIAVGVKSPLVCAINNAFSRYSISDNDLFHFNKKMFARRRILLKKNRHKRAGHGAKNKLKPITILTEKSERFRKKLIERWACEIADFFIKNKVGTVQMENLESMKRKEDSYFNIRLRGFWPYAEMQNKIEFKLKQYGIEIRKVAPNNTSKTCSKCGHLNNYFNFEYRKKNKFPHFKCEKCNFKENADYNAALNISNPKLKSTKEEPGSSGSSGMAKGDPKKPKGKMSAYAFFVQTCREEHKKKNPEVPVNFAEFSKKCSERWKTMSGKEKSKFDEMAKADKVRYDREMKDYG

SEQ ID NO: 281 - protein, 838 aa, Artificial Sequence
  dCas14-FokI-HMGB4
  misc_feature: synthetic
MAVTAPKKKRKVGGSGSQLVKSELEEKKSELRHKLKYVPHEYIELIEIARNSTQDRILEMKVMEFFMKVYGYRGKHLGGSRKPDGAIYTVGSPIDYGVIVDTKAYSGGYNLPIGQADEMQRYVEENQTRNKHINPNEWWKVYPSSVTEFKFLFVSGHFKGNYKAQLTRLNHITNCNGAVLSVEELLIGGEMIKAGTLTLEEVRRKFNNGEINFSGSETPGTSESATPESGTMAKNTITKTLKLRIVRPYNSAEVEKIVADEKNNREKIALEKNKDKVKEACSKHLKVAAYCTTQVERNACLFCKARKLDDKFYQKLRGQFPDAVFWQEISEIFRQLQKQAAEIYNQSLIELYYEIFIKGKGIANASSVEHYLSDVCYTRAAELFKNAAIASGLRSKIKSNFRLKELKNMKSGLPTTKSDNFPIPLVKQKGGQYTGFEISNHNSDFIIKIPFGRWQVKKEIDKYRPWEKFDFEQVQKSPKPISLLLSTQRRKRNKGWSKDEGTEAEIKKVMNGDYQTSYIEVKRGSKICEKSAWMLNLSIDVPKIDKGVDPSIIGGIAVGVKSPLVCAINNAFSRYSISDNDLFHFNKKMFARRRILLKKNRHKRAGHGAKNKLKPITILTEKSERFRKKLIERWACEIADFFIKNKVGTVQMENLESMKRKEDSYFNIRLRGFWPYAEMQNKIEFKLKQYGIEIRKVAPNNTSKTCSKCGHLNNYFNFEYRKKNKFPHFKCEKCNFKENADYNAALNISNPKLKSTKEEPGKEIQLKPKANVSSYVHFLLNYRNKFKEQQPNTYVGFKEFSRKCSEKWRSISKHEKAKYEALAKLDKARYQEEMMNYV

SEQ ID NO: 282 - DNA, 225 bp, Artificial Sequence
  dCas14-FokI Siglec SL SCNA
  misc_feature: synthetic
gggcuucacugauaaaguggagaaccgcuucaccaaaagcugucccuuaggggauuagaacuugagugaaggugggcugcuugcaucagccuaaugucgagaagugcuuucuucggaaaguaacccucgaaacaaauucauuuuuccucuccaauucugcacaagaaaguugcagaacccgaauagacgaaugaaggaaugcaacgggtggagagaggaagctat

SEQ ID NO: 283 - DNA, 225 bp, Artificial Sequence
  dCas14-FokI Siglec ASR SCNA
  misc_feature: synthetic
gggcuucacugauaaaguggagaaccgcuucaccaaaagcugucccuuaggggauuagaacuugagugaaggugggcugcuugcaucagccuaaugucgagaagugcuuucuucggaaaguaacccucgaaacaaauucauuuuuccucuccaauucugcacaagaaaguugcagaacccgaauagacgaaugaaggaaugcaacagaaagaacccatcgttcat

SEQ ID NO: 284 - protein, 1602 aa, Artificial Sequence
  Ancestral dCas9-FokI
  misc_feature: synthetic
MAPKKKRKVGGSGSQLVKSELEEKKSELRHKLKYVPHEYIELIEIARNSTQDRILEMKVMEFFMKVYGYRGKHLGGSRKPDGAIYTVGSPIDYGVIVDTKAYSGGYNLPIGQADEMQRYVEENQTRNKHINPNEWWKVYPSSVTEFKFLFVSGHFKGNYKAQLTRLNHITNCNGAVLSVEELLIGGEMIKAGTLTLEEVRRKFNNGEINFSGSETPGTSESATPESGTDKKYSIGLAIGTNSVGWAVITDDYKVPSKKMKVLGNTDRQSIKKNLIGALLFDSGETAEATRLKRTARRRYTRRKNRICYLQEIFANEMAKLDDSFFHRLEESFLVEEDKKHERHPIFGNLVDEVAYHENYPTIYHLRKKLADSTEKADLRLIYLALAHMIKFRGHFLIEGDLNAENSDVDKLFIQLVQTYNQLFEENPINESGVDAKAILSARLSKSRRLENLIAQFPGEKKNGLFGNIIALALGLTPNFKSNFDLTEDAKLQLSKDTYDDDLDELLGQIGDQYADLFLAAKNLSDAILLSDILRVNSEITKAPLSASMVKRYDEHHQDLALLKTLVRQQLPEKYKEIFSDQSKNGYAGYIDIGIKHRKRTTKRTSQEEFYKFIKPILEKMDGAEELLAKLNREDLLRKQRTFDNGSIPHQIHLGELHAILRRQEEFYPFLKDNREKIEKILTFRIPYYVGPLARGNSRFAWMTRKSDEAITPWNFEEVVDKGASAQSFIERMTNFDEYLPNKKVLPKHSLLYEYFTVYNELTKVKYVTEGMRKPEFLSGEQKEAIVDLLFKTNRKVTVKQLKEDYFKKIECFDSVEIIGVEDRFNASLGTYHDLLKIIKDKDFLDNEENEDILEDIVLTLTLFEDREMIEERLKKYANLFDDKVMKQLKRRHYTGWGRLSRKMINGIRDKQSGKTILDFLKSDGFSNRNFMQLIHDDSLTFKEEIEKAQVSGQGDSLHEQIADLAGSPAIKKGILQTVKIVDELVKVMGHKPENIVIEMARENQTTQKGQKNSRERMKRIEEGIKELGSQILKEHPVENTQLQNEKLYLYYLQNGKDMYTGDELDINRLYQYDVDAIIPQSFIKDNSIDNKVLTSSKENRGKSDDVPSEEVVKKMKNYWRQLLNAKLITQRKFDNLTKAERGGLSEADKAGFIKRQLVETRQITKHVAQILDSRMNTKRDKNDKPIREVKVITLKSKLVSDFRKDFQLYKVREINNYHHAHDAYLNAVVGTALIKKYPKLESEFVYGDYKVYDVRKMIAKSEQEIGKATAKRFFYSNIMNFFKTEVKLANGEIRKRPLIETNEETGEIVWDKEKDFATVRKVLSMPQVNIVKKTEVQTGGFSKESILSKGESDKLIPRKKGWDSKKYGGFGSPTVAYSVLVVAKVEKGKAKKLKTVKELVGITIMEKSSFEKDPIGFLEAKGYKDIQKDLIIKLPKYSLFELENGRRRMLASATELQKANELVLPQHLVTLLYHAHKIESSKESENQAYIEQHRHEFDEILEYIIDFSEKYILAEKNISKVKSLFNKQFEDSDISELSNSFINLLTLTSFGAPAAFKFLDTTIKQGRKRYQSTKEVLDATLIHQSITGLYETRTDLSQLGGD

SEQ ID NO: 285 - DNA, 154 bp, Homo sapiens
  misc_feature: Human CTLA4 exon and 5' untranslated sequence
ttttgctctacttcctgaagacctgaacaccgctcccataaagccatggcttgccttggatttcagcggcacaaggctcagctgaacctggctaccaggacctggccctgcactctcctgttttttcttctcttcatccctgtcttctgcaaag

SEQ ID NO: 286 - DNA, 122 bp, Artificial Sequence
  dCasX-FokI CTLA4 SL SCNA
  misc_feature: synthetic
ggcgcgtttattccattactttggagccagtcccagcgactatgtcgtatggacgaagcgcttatttatcggagagaaaccgataagtaaaacgcatcaaagugaagaccugaacaccgcuc

SEQ ID NO: 287 - DNA, 122 bp, Artificial Sequence
  dCasX-FokI CTLA4 ASR SCNA
  misc_feature: synthetic
ggcgcgtttattccattactttggagccagtcccagcgactatgtcgtatggacgaagcgcttatttatcggagagaaaccgataagtaaaacgcatcaaaggccgcugaaauccaaggcaa

SEQ ID NO: 288 - protein, 1610 aa, Artificial Sequence
  dScCas9-CspCI
  misc_feature: synthetic
MAPKKKRKVGGSGSQLVGMLNPPYSQSKSDAELHELYFVKQMLDTLTPGGVGIAIVPMSSAISPNPMREELMKYHSLDAVMSMPQELFYPVGTVTCVMVWIAGVPHEQMSKKTWFGYWRDDGFVKTKHKGRIDMNGTWPDIRDRWIEMYRNREVHAGESIMQKVGPDDEWCAEAYMETDYSVLTQSDFEKVVQSYALFKLFGQGSSQSEVKGATDAEDSGSETPGTSESATPESGTEKKYSIGLAIGTNSVGWAVITDDYKVPSKKFKVLGNTNRKSIKKNLMGALLFDSGETAEATRLKRTARRRYTRRKNRIRYLQEIFANEMAKLDDSFFQRLEESFLVEEDKKNERHPIFGNLADEVAYHRNYPTIYHLRKKLADSPEKADLRLIYLALAHIIKFRGHFLIEGKLNAENSDVAKLFYQLIQTYNQLFEESPLDEIEVDAKGILSARLSKSKRLEKLIAVFPNEKKNGLFGNIIALALGLTPNFKSNFDLTEDAKLQLSKDTYDDDLDELLGQIGDQYADLFSAAKNLSDAILLSDILRSNSEVTKAPLSASMVKRYDEHHQDLALLKTLVRQQFPEKYAEIFKDDTKNGYAGYVGIGIKHRKRTTKLATQEEFYKFIKPILEKMDGAEELLAKLNRDDLLRKQRTFDNGSIPHQIHLKELHAILRRQEEFYPFLKENREKIEKILTFRIPYYVGPLARGNSRFAWLTRKSEEAITPWNFEEVVDKGASAQSFIERMTNFDEQLPNKKVLPKHSLLYEYFTVYNELTKVKYVTERMRKPEFLSGEQKKAIVDLLFKTNRKVTVKQLKEDYFKKIECFDSVEIIGVEDRFNASLGTYHDLLKIIKDKDFLDNEENEDILEDIVLTLTLFEDREMIEERLKTYAHLFDDKVMKQLKRRHYTGWGRLSRKMINGIRDKQSGKTILDFLKSDGFSNRNFMQLIHDDSLTFKEEIEKAQVSGQGDSLHEQIADLAGSPAIKKGILQTVKIVDELVKVMGHKPENIVIEMARENQTTTKGLQQSRERKKRIEEGIKELESQILKENPVENTQLQNEKLYLYYLQNGRDMYVDQELDINRLSDYDVDAIVPQSFIKDDSIDNKVLTRSVENRGKSDNVPSEEVVKKMKNYWRQLLNAKLITQRKFDNLTKAERGGLSEADKAGFIKRQLVETRQITKHVARILDSRMNTKRDKNDKPIREVKVITLKSKLVSDFRKDFQLYKVRDINNYHHAHDAYLNAVVGTALIKKYPKLESEFVYGDYKVYDVRKMIAKSEQEIGKATAKRFFYSNIMNFFKTEVKLANGEIRKRPLIETNGETGEVVWNKEKDFATVRKVLAMPQVNIVKKTEVQTGGFSKESILSKRESAKLIPRKKGWDTRKYGGFGSPTVAYSILVVAKVEKGKAKKLKSVKVLVGITIMEKGSYEKDPIGFLEAKGYKDIKKELIFKLPKYSLFELENGRRRMLASATELQKANELVLPQHLVRLLYYTQNISATTGSNNLGYIEQHREEFKEIFEKIIDFSEKYILKNKVNSNLKSSFDEQFAVSDSILLSNSFVSLLKYTSFGASGGFTFLDLDVKQGRLRYQTVTEVLDATLIYQSITGLYETRTDLSQLGGD

SEQ ID NO: 289 - protein, 1586 aa, Artificial Sequence
  dScCas9-BsgI
  misc_feature: synthetic
MAPKKKRKVGGSGSQLVFKSEFELNMARHLSEMEILNYITEFEIGTGNFVWNQNKDDIYNQYVEDSIPLIMGPSINLDGINLENSKYNYCVVSNENKYIRNDIVILYRRMSPIGNEIRMIATIINTDSIPKYVLENHVNFIKHENYNMRKIQMMLQFITSEDFETMIDIFCQTNQVSSNDLFTIFEVLMSLRNHSGSETPGTSESATPESGTEKKYSIGLAIGTNSVGWAVITDDYKVPSKKFKVLGNTNRKSIKKNLMGALLFDSGETAEATRLKRTARRRYTRRKNRIRYLQEIFANEMAKLDDSFFQRLEESFLVEEDKKNERHPIFGNLADEVAYHRNYPTIYHLRKKLADSPEKADLRLIYLALAHIIKFRGHFLIEGKLNAENSDVAKLFYQLIQTYNQLFEESPLDEIEVDAKGILSARLSKSKRLEKLIAVFPNEKKNGLFGNIIALALGLTPNFKSNFDLTEDAKLQLSKDTYDDDLDELLGQIGDQYADLFSAAKNLSDAILLSDILRSNSEVTKAPLSASMVKRYDEHHQDLALLKTLVRQQFPEKYAEIFKDDTKNGYAGYVGIGIKHRKRTTKLATQEEFYKFIKPILEKMDGAEELLAKLNRDDLLRKQRTFDNGSIPHQIHLKELHAILRRQEEFYPFLKENREKIEKILTFRIPYYVGPLARGNSRFAWLTRKSEEAITPWNFEEVVDKGASAQSFIERMTNFDEQLPNKKVLPKHSLLYEYFTVYNELTKVKYVTERMRKPEFLSGEQKKAIVDLLFKTNRKVTVKQLKEDYFKKIECFDSVEIIGVEDRFNASLGTYHDLLKIIKDKDFLDNEENEDILEDIVLTLTLFEDREMIEERLKTYAHLFDDKVMKQLKRRHYTGWGRLSRKMINGIRDKQSGKTILDFLKSDGFSNRNFMQLIHDDSLTFKEEIEKAQVSGQGDSLHEQIADLAGSPAIKKGILQTVKIVDELVKVMGHKPENIVIEMARENQTTTKGLQQSRERKKRIEEGIKELESQILKENPVENTQLQNEKLYLYYLQNGRDMYVDQELDINRLSDYDVDAIVPQSFIKDDSIDNKVLTRSVENRGKSDNVPSEEVVKKMKNYWRQLLNAKLITQRKFDNLTKAERGGLSEADKAGFIKRQLVETRQITKHVARILDSRMNTKRDKNDKPIREVKVITLKSKLVSDFRKDFQLYKVRDINNYHHAHDAYLNAVVGTALIKKYPKLESEFVYGDYKVYDVRKMIAKSEQEIGKATAKRFFYSNIMNFFKTEVKLANGEIRKRPLIETNGETGEVVWNKEKDFATVRKVLAMPQVNIVKKTEVQTGGFSKESILSKRESAKLIPRKKGWDTRKYGGFGSPTVAYSILVVAKVEKGKAKKLKSVKVLVGITIMEKGSYEKDPIGFLEAKGYKDIKKELIFKLPKYSLFELENGRRRMLASATELQKANELVLPQHLVRLLYYTQNISATTGSNNLGYIEQHREEFKEIFEKIIDFSEKYILKNKVNSNLKSSFDEQFAVSDSILLSNSFVSLLKYTSFGASGGFTFLDLDVKQGRLRYQTVTEVLDATLIYQSITGLYETRTDLSQLGGD

SEQ ID NO: 290 - protein, 1565 aa, Artificial Sequence
  dScCas9-BbvI
  misc_feature: synthetic
MAPKKKRKVGGSGSQLALNHEFTRHKKKVVEMLNHIAPGGNAWSESIPEELRLNVKKVRMSQIYRRLHPDQPSYTVTGSGGGGTHGYHWEEPRALTNRERARLQTFPDDYEFIGKKEMVRKQIGMAVPPDGAKIILEAVLKTFARIEYPSINSKWDFESVSAEQVIEEVQEIMSGSETPGTSESATPESGTEKKYSIGLAIGTNSVGWAVITDDYKVPSKKFKVLGNTNRKSIKKNLMGALLFDSGETAEATRLKRTARRRYTRRKNRIRYLQEIFANEMAKLDDSFFQRLEESFLVEEDKKNERHPIFGNLADEVAYHRNYPTIYHLRKKLADSPEKADLRLIYLALAHIIKFRGHFLIEGKLNAENSDVAKLFYQLIQTYNQLFEESPLDEIEVDAKGILSARLSKSKRLEKLIAVFPNEKKNGLFGNIIALALGLTPNFKSNFDLTEDAKLQLSKDTYDDDLDELLGQIGDQYADLFSAAKNLSDAILLSDILRSNSEVTKAPLSASMVKRYDEHHQDLALLKTLVRQQFPEKYAEIFKDDTKNGYAGYVGIGIKHRKRTTKLATQEEFYKFIKPILEKMDGAEELLAKLNRDDLLRKQRTFDNGSIPHQIHLKELHAILRRQEEFYPFLKENREKIEKILTFRIPYYVGPLARGNSRFAWLTRKSEEAITPWNFEEVVDKGASAQSFIERMTNFDEQLPNKKVLPKHSLLYEYFTVYNELTKVKYVTERMRKPEFLSGEQKKAIVDLLFKTNRKVTVKQLKEDYFKKIECFDSVEIIGVEDRFNASLGTYHDLLKIIKDKDFLDNEENEDILEDIVLTLTLFEDREMIEERLKTYAHLFDDKVMKQLKRRHYTGWGRLSRKMINGIRDKQSGKTILDFLKSDGFSNRNFMQLIHDDSLTFKEEIEKAQVSGQGDSLHEQIADLAGSPAIKKGILQTVKIVDELVKVMGHKPENIVIEMARENQTTTKGLQQSRERKKRIEEGIKELESQILKENPVENTQLQNEKLYLYYLQNGRDMYVDQELDINRLSDYDVDAIVPQSFIKDDSIDNKVLTRSVENRGKSDNVPSEEVVKKMKNYWRQLLNAKLITQRKFDNLTKAERGGLSEADKAGFIKRQLVETRQITKHVARILDSRMNTKRDKNDKPIREVKVITLKSKLVSDFRKDFQLYKVRDINNYHHAHDAYLNAVVGTALIKKYPKLESEFVYGDYKVYDVRKMIAKSEQEIGKATAKRFFYSNIMNFFKTEVKLANGEIRKRPLIETNGETGEVVWNKEKDFATVRKVLAMPQVNIVKKTEVQTGGFSKESILSKRESAKLIPRKKGWDTRKYGGFGSPTVAYSILVVAKVEKGKAKKLKSVKVLVGITIMEKGSYEKDPIGFLEAKGYKDIKKELIFKLPKYSLFELENGRRRMLASATELQKANELVLPQHLVRLLYYTQNISATTGSNNLGYIEQHREEFKEIFEKIIDFSEKYILKNKVNSNLKSSFDEQFAVSDSILLSNSFVSLLKYTSFGASGGFTFLDLDVKQGRLRYQTVTEVLDATLIYQSITGLYETRTDLSQLGGD

SEQ ID NO: 291 - protein, 10 aa, Artificial Sequence
  ScCas9 "Sc loop"
  misc_feature: synthetic
IKHRKRTTKL

SEQ ID NO: 292 - protein, 58 aa, Streptococcus canis
DYKVYDVRKMIAKSEQEIGKATAKRFFYSNIMNFFKTEVKLANGEIRKRPLIETNGET

SEQ ID NO: 293 - DNA, 3814 bp, Artificial Sequence
  CAR-T NY-ESO-1 cassette for integration at PD-1 locus
  misc_feature: synthetic
agagggggccacccaccttccccaggcagggaggcccggcccccagggagatgggggggatgggggaggagaagggcctgcccccacccggcagcctcaggaggggcagctcgggcgggatatggaaagaggccacagcagtgagcagagacacagaggaggaaggggccctgagctggggagacccccacggggtagggcgtgggggccacgggcccacctcctccccatctcctctgtctccctgtctctgtctctctctccctcccccaccctctccccagtcctaccccctcctcacccctcctcccccagcactgcctctgtcactctcgcccacgtggatgtggaggaagagggggcgggagcaaggggcgggcaccctcccttcaacctgacctgggacagtttcccttccgctcacctccgcctgagcagtggagaaggcggcactctggtggggctgctccaggcatgcagatcccacaggcgccctggccttcatagcccatatatggagttccgcgttacataacttacggtaaatggcccgcctggctgaccgcccaacgacccccgcccattgacgtcaataatgacgtatgttcccatagtaacgccaatagggactttccattgacgtcaatgggtggagtatttacggtaaactgcccacttggcagtacatcaagtgtatcatatgccaagtacgccccctattgacgtcaatgacggtaaatggcccgcctggcattatgcccagtacatgaccttatgggactttcctacttggcagtacatctacgtattagtcatcgctattaccatggtgatgcggttttggcagtacatcaatgggcgtggatagcggtttgactcacggggatttccaagtctccaccccattgacgtcaatgggagtttgttttggcaccaaaatcaacgggactttccaaaatgtcgtaacaactccgccccattgacgcaaatgggcggtaggcgtgtacggtgggaggtctatataagcagagctggtttagtgaaccgtcagatcctcgagatgctgctgctggtgaccagcctgctgctgtgtgagctgccccaccccgcctttctggaagtacaacttcttgagagcggagggggcctcgtgcaacctggggggtcactgcgactttcctgcgccgcatccggcttcacgtttagcacgtaccaaatgtcctgggtccgacaggccccaggcaaaggcctcgaatgggtgagtggcattgtgagcagcggcggtagtaccgcatatgctgactccgtcaagggccggttcaccatctcccgcgataattccaagaataccctgtatttgcaaatgaatagtttgagagctgaagacactgccgtctattattgcgcgggcgaactcctgccttactatggtatggacgtgtggggtcagggtaccaccgtaacagtctcttcaggtggtggaggatctgggggcggaggatccggtggaggaggatcacaatccgaacttacgcagcctcgatccgtatccgggagccctgggcagagtgtgacaatatcctgtaccgggacatcaagggatgtaggcggatataactacgtctcttggtaccaacaacacccgggtaaggctccgaagctgataatccatgacgtgatagagcgatcctccggggtgccggatagattctcagggtccaaaagtggcaatacagctagtctcacaatatcaggactccaagctgaagatgaggccgattattactgttggtcctttgcagggtcttattatgtttttgggacaggaactgatgtcacggtgctcggtagcgagagcaagtacggccctccctgccccccttgccctgcccccgagttcctgggcggacccagcgtgttcctgttcccccccaagcccaaggacaccctgatgatcagccggacccccgaggtgacctgtgtggtggtggacgtgtcccaggaggaccccgaggtccagttcaactggtacgtggacggcgtggaggtgcacaacgccaagaccaagccccgggaggagcagttcaatagcacctaccgggtggtgtccgtgctgaccgtgctgcaccaggactggctgaacggcaaggaatacaagtgtaaggtgtccaacaagggcctgcccagcagcatcgagaaaaccatcagcaaggccaagggccagcctcgggagccccaggtgtacaccctgccccctagccaagaggagatgaccaagaatcaggtgtccctgacctgcctggtgaagggcttctaccccagcgacatcgccgtggagtgggagagcaacggccagcccgagaacaactacaagaccaccccccctgtgctggacagcgacggcagcttcttcctgtacagcaggctgaccgtggacaagagccggtggcaggagggcaacgtctttagctgctccgtgatgcacgaggccctgcacaaccactacacccagaagagcctgtccctgagcctgggcaagatgatctacatctgggcccctctggccggcacctgtggcgtgctgctgctgagcctggtcatcaccctgtactgcaaccaccggaataggagcaagcggagcagaggcggccacagcgactacatgaacatgaccccccggaggcctggccccacccggaagcactaccagccctacgcccctcccagggacttcgccgcctaccggagccgggtgaagttcagccggagcgccgacgcccctgcctaccagcagggccagaaccagctgtacaacgagctgaacctgggccggagggaggagtacgacgtgctggacaagcggagaggccgggaccctgagatgggcggcaagccccggagaaagaaccctcaggagggcctgtataacgaactgcagaaagacaagatggccgaggcctacagcgagatcggcatgaagggcgagcggcggaggggcaagggccacgacggcctgtaccagggcctgagcaccgccaccaaggatacctacgacgccctgcacatgcaggccctgccccccagatgagtgtgccttctagttgccagccatctgttgtttgcccctcccccgtgccttccttgaccctggaaggtgccactcccactgtcctttcctaataaaatgaggaaattgcatcgcattgtctgagtaggtgtcattctattctggggggtggggtggggcaggacagcaagggggaggattgggaagacaatagcaggcatgctggggatgcggtgggctctatggcgctacaactgggctggcggccaggatggttcttaggtaggtggggtcggcggtcaggtgtcccagagccaggggtctggagggaccttccaccctcagtccctggcaggtcggggggtgctgaggcgggcctggccctggcagcccaggggtcccggagcgaggggtctggagggacctttcactctcagtccctggcaggtcggggggtgctgtggcaggcccagccttggcccccagctctgccccttaccctgagctgtgtggctttgggcagctcgaactcctgggttcctctctgggccccaactcctcccctggcccaagtcccctctttgctcctgggcaggcaggacctctgtcccctctcagccggtccttggggctgcgtgtttctgtagaatgacgggtcaggctggccagaaccccaaaccttggccgtggggagtctgcgtggcggctctgccttgcccaggcatccttggtcctcactcgagtttt

SEQ ID NO: 294 - DNA, 6370 bp, Artificial Sequence
  dScCas9-FokI -EMX1sgRNA15T1-NNG
  misc_feature: synthetic
atagtaatcaattacggggtcattagttcatagcccatatatggagttccgcgttacataacttacggtaaatggcccgcctggctgaccgcccaacgacccccgcccattgacgtcaataatgacgtatgttcccatagtaacgccaatagggactttccattgacgtcaatgggtggagtatttacggtaaactgcccacttggcagtacatcaagtgtatcatatgccaagtacgccccctattgacgtcaatgacggtaaatggcccgcctggcattatgcccagtacatgaccttatgggactttcctacttggcagtacatctacgtattagtcatcgctattaccatggtgatgcggttttggcagtacatcaatgggcgtggatagcggtttgactcacggggatttccaagtctccaccccattgacgtcaatgggagtttgttttggcaccaaaatcaacgggactttccaaaatgtcgtaacaactccgccccattgacgcaaatgggcggtaggcgtgtacggtgggaggtctatataagcagagctggtttagtgaaccgtcagatccgctagcgctaccggtatggcccctaagaagaagagaaaagtcggcggctctggcagccagctggtcaagtctgagctggaagagaagaaaagcgagctgcggcacaagctgaaatacgtgccccacgagtacatcgagctgatcgagatcgccagaaacagcacccaggacagaatcctggaaatgaaggtcatggaattctttatgaaggtgtacggctaccggggcaagcacctcggaggatctagaaagcctgacggcgccatctataccgtgggcagccctatcgattacggcgtgatcgtggataccaaggcctacagcggcggctacaatctgcctattggacaggccgacgagatgcagagatacgtggaagaaaaccagacacggaacaagcacatcaaccccaacgagtggtggaaagtgtaccccagcagcgtgaccgagttcaagttcctgttcgtgtccggccacttcaagggcaactacaaggcccagctgacccggctgaaccacatcacaaattgcaacggcgctgtgctgtctgtggaagaactgctgatcggcggcgagatgatcaaggccggaacactgacactggaagaagtgcggcggaagttcaacaacggcgagatcaacttcagcggcagcgagacacctggcacatctgaatctgccacacctgagagcatggaaaagaagtacagcatcggcctggccatcggcacaaattctgttggctgggccgtgatcaccgacgactacaaggtgcccagcaagaaattcaaggtgctgggcaacaccaaccggaagtccatcaagaaaaacctgatgggcgccctgctgttcgattctggcgaaacagccgaggccaccagactgaagagaaccgccagaagaagatacacccggcggaagaaccggatcagatacctgcaagagatcttcgccaacgagatggccaagctggacgacagcttctttcagagactggaagagtccttcctggtggaagaggacaagaagaacgagcggcaccccatcttcggcaatctggctgatgaggtggcctaccacagaaactaccccaccatctaccacctgaggaagaagctggccgactctcctgagaaggccgacctgagactgatctatctggccctggctcacatcatcaagttccggggccacttcctgatcgagggcaagctgaatgccgagaacagcgacgtggccaaactgttctaccagctgatccagacctacaaccagctgttcgaggaaagccctctggacgagattgaggtggacgccaagggaatcctgagcgccagactgagcaagagcaagcggctggaaaagctgatcgccgtgtttcccaacgagaagaagaatggcctgttcggcaacatcattgccctggcactgggcctgacacctaacttcaagtccaacttcgacctgaccgaggacgccaaactgcagctgagcaaggacacctacgacgacgatctggatgagctgctgggccagatcggagatcagtacgccgatctgttcagcgccgccaagaatctgtctgacgccatcctgctgagcgacatcctgagatccaacagcgaagtgacaaaggcccctctgagcgcctccatggtcaagagatatgacgagcaccaccaggacctggctctgctgaaaacccttgtgcggcagcagttccccgagaagtatgccgagatcttcaaggacgacaccaagaacggctacgccggctatgttggcatcggcatcaagcacagaaagcggaccaccaagctggccacacaagaggaattctacaagttcatcaagcccatcctcgagaagatggacggcgccgaagaactcctggctaagctgaacagggacgacctgctgcggaagcagagaaccttcgacaatggcagcatccctcaccagatccacctgaaagagctgcacgccattctgcggcggcaagaagagttctacccattcctgaaagaaaaccgggaaaagattgagaagatcctgaccttcaggatcccctactacgtgggaccactggccagaggcaatagcagattcgcttggctgaccagaaagagcgaggaagccatcacaccctggaacttcgaggaagtggtggataagggcgccagcgctcagtccttcatcgagcggatgaccaatttcgacgagcagctgcccaacaagaaggtgctgcctaagcacagcctgctgtacgagtacttcaccgtgtacaatgagctgaccaaagtcaaatacgtgacagagcggatgcggaagcctgagtttctgagcggcgagcagaaaaaggccatcgtggatctgctgttcaagaccaacagaaaagtgaccgtgaagcagctgaaagaggactacttcaagaaaatcgagtgcttcgacagcgtcgagatcatcggcgtggaagatagattcaacgccagcctgggcacataccacgatctgctgaagattatcaaggacaaggacttcctggacaacgaggaaaacgaggacatcctggaagatatcgtgctgaccctgacactgtttgaggacagagagatgatcgaggaacggctgaaaacatacgcccacctgttcgacgacaaagtgatgaagcaactgaagcggcggcactacacaggctggggcagactgtccagaaagatgattaacggcatccgggacaagcagagcggcaagaccatcctggactttctgaagtccgacggcttcagcaaccggaacttcatgcagctgattcacgacgacagcctcaccttcaaagaggaaatcgagaaggcccaggtttccggccagggcgattctctgcacgagcagattgctgatctggccggatctcccgccattaagaagggcatcctgcagacagtgaagatcgtggacgaactcgtgaaagtgatgggccacaagcctgagaacatcgtgatcgaaatggccagagagaaccagaccaccaccaagggcctgcagcagtccagagagagaaagaagcggatcgaagagggcatcaaagagctggaaagccagatcctcaaagagaaccccgtcgagaacacccagctgcagaacgagaagctgtacctgtactacctgcagaatggacgggatatgtacgtggaccaagaactggacatcaaccggctgtccgactacgatgtggatgccatcgtgccccagagcttcatcaaggatgacagcatcgacaacaaggtcctgaccagatccgtggaaaacagaggcaagagcgacaacgtgccctccgaagaggtggtcaagaagatgaagaattactggcgacagctgctgaacgccaagctgatcacccagagaaagttcgacaacctgaccaaggccgagagaggcggactgtctgaagctgataaggccggcttcattaagcggcagctggtggaaacccggcagatcacaaagcacgtggcccggatcctggacagcagaatgaacaccaagcgggacaagaacgacaagcctatccgggaagtgaaagtcatcaccctgaagtccaagctggtgtccgatttccggaaggatttccagctgtacaaagtgcgcgacatcaacaactaccatcacgcccacgacgcctacctgaatgctgttgtgggaacagccctgatcaagaagtaccctaagctggaatccgagttcgtgtacggcgactacaaagtgtacgacgtgcggaagatgatcgccaagagcgagcaagagattggcaaggccaccgccaagcggttcttctactccaacatcatgaactttttcaagaccgaagtgaagctcgccaacggcgaaatccggaagaggcccctgattgagacaaatggcgagacaggcgaggtcgtgtggaacaaagagaaggacttcgccaccgtgcggaaagtgctggccatgcctcaagtgaatatcgtgaaaaagaccgaggtgcagaccggcggcttctccaaagagagcatcctgtctaagagagagagcgccaagctcatccctcggaagaaaggctgggatacacggaagtacggcggatttggaagccctaccgtggcctactctattctggtggtggccaaggtggaaaagggcaaagccaagaaactgaagtctgtgaaggtgctcgtggggatcaccatcatggaaaaaggcagctacgagaaggaccctatcggctttctggaagccaagggctacaaggacatcaaaaaagagctgatctttaagctccccaagtacagcctgttcgaactggaaaacggcagacgcagaatgctggcctctgccacagaactgcagaaagccaatgaactggtgctgccacaacacctcgtgcggctgctgtactacacccagaatatcagcgccaccaccggcagcaacaacctgggatatatcgagcagcaccgggaagagttcaaagagattttcgagaaaatcatcgacttcagcgagaagtacatcctgaagaacaaagtgaacagcaacctcaagagcagcttcgatgagcagttcgccgtgtccgactctatcctgctgtctaacagcttcgtgtccctgctgaagtacacctcctttggcgcctctggcggcttcacctttctggatctggacgtgaaacaggggagactgagataccagaccgtgactgaggtgctggacgccactctgatctaccagagcatcaccggcctgtacgagacaagaaccgatctctctcagctcggaggcgactaaaagcttctgtgccttctagttgccagccatctgttgtttgcccctcccccgtgccttccttgaccctggaaggtgccactcccactgtcctttcctaataaaatgaggaaattgcatcgcattgtctgagtaggtgtcattctattctggggggtggggtggggcaggacagcaagggggaggattgggaagacaatagcaggcatgctggggatgcggtgggctctatggacaaacccacaactacgcgtaaaaaaaaagcaccgactcggtgccactttttcaagttgataacggactagccttattttaacttgctatttctagctctaaaactcctctagaaactcgtagagggtgtttcgtggtctcatacagaacttataagattcccaaatccaaagacatttcacgtttatggtgatttcccagaacacatagcgacatgcaaatattgcagggcgccactcccctgtccctcacagccatcttcctgccagggcgcacgcgcgctgggtgttcccgcctagtgacactgggcccgcgattccttggagcgggttgatgacgtcagcgttcaaagagggcctatttcccatgattccttcatatttgcatatacgatacaaggctgttagagagataattggaattaatttgactgtaaacacaaagatattagtacaaaatacgtgacgtagaaagtaataatttcttgggtagtttgcagttttaaaattatgttttaaaatggactatcatatgcttaccgtaacttgaaagtatttcgatttcttggctttatatatcttgtggaaaggacgaaacacctgcactcctccaccttggctgttttagagctagaaatagcaagttaaaataaggctagtccgttatcaacttgaaaaagtggcaccgagtcggtgctttttttacgcgtacttgcggccgcatattcctaggatatt

SEQ ID NO: 295 - DNA, 8890 bp, Artificial Sequence
  pPZP-RCS
  misc_feature: synthetic
ctacttgcattacagcttacgaaccgaacgaggcttatgtccactgggttcgtgcccgaattgatcacaggcagcaacgctctgtcatcgttacaatcaacatgctaccctccgcgagatcatccgtgtttcaaacccggcagcttagttgccgttcttccgaatagcatcggtaacatgagcaaagtctgccgccttacaacggctctcccgctgacgccgtcccggactgatgggctgcctgtatcgagtggtgattttgtgccgagctgccggtcggggagctgttggctggctggtggcaggatatattgtggtgtaaacaaattgacgcttagacaacttaataacacattgcggacgtttttaatgtactgaattaacgccgaattgaattcctcgagtacgtaggatccatttaaattctagaggcgcgccgcggccgctcctgctgagcctcgacatgttgtcgcaaaattcgccctggacccgcccaacgatttgtcgtcactgtcaaggtttgacctgcacttcatttggggcccacatacaccaaaaaaatgctgcataattctcggggcagcaagtcggttacccggccgccgtgctggaccgggttgaatggtgcccgtaactttcggtagagcggacggccaatactcaacttcaaggaatctcacccatgcgcgccggcggggaaccggagttcccttcagtgagcgttattagttcgccgctcggtgtgtcgtagatactagcccctggggcacttttgaaatttgaataagatttatgtaatcagtcttttaggtttgaccggttctgccgctttttttaaaattggatttgtaataataaaacgcaattgtttgttattgtggcgctctatcatagatgtcgctataaacctattcagcacaatatattgttttcattttaatattgtacatataagtagtagggtacaatcagtaaattgaacggagaatattattcataaaaatacgatagtaacgggtgatatattcattagaatgaaccgaaaccggcggtaaggatctgagctacacatgctcaggttttttacaacgtgcacaacagaattgaaagcaaatatcatgcgatcataggcgtctcgcatatctcattaaagcaggactctagggactagttctagactaggtggatcctcagaagaactcgtcaagaaggcgatagaaggcgatgcgctgcgaatcgggagcggcgataccgtaaagcacgaggaagcggtcagcccattcgccgccaagctcttcagcaatatcacgggtagccaacgctatgtcctgatagcggtccgccacacccagccggccacagtcgatgaatccagaaaagcggccattttccaccatgatattcggcaagcaggcatcgccatgggtcacgacgagatcatcgccgtcgggcatgcgcgccttgagcctggcgaacagttcggctggcgcgagcccctgatgctcttcgtccagatcatcctgatcgacaagaccggcttccatccgagtacgtgctcgctcgatgcgatgtttcgcttggtggtcgaatgggcaggtagccggatcaagcgtatgcagccgccgcattgcatcagccatgatggatactttctcggcaggagcaaggtgagatgacaggagatcctgccccggcacttcgcccaatagcagccagtcccttcccgcttcagtgacaacgtcgagcacagctgcgcaaggaacgcccgtcgtggccagccacgatagccgcgctgcctcgtcctgcagttcattcagggcaccggacaggtcggtcttgacaaaaagaaccgggcgcccctgcgctgacagccggaacacggcggcatcagagcagccgattgtctgttgtgcccagtcatagccgaatagcctctccacccaagcggccggagaacctgcgtgcaatccatcttgttcaatcatgtcgactgcagaattcgaagcttgagctcgagatctgagtccggattggtagattgcaaatataatggtttggcgattatccttgaggccacacctttaaatagatcaatgaatgggcaagtattgacttgcgataatcctttaactttctgcctaccatcaatgtggatgagttgtcggtaaaaaggatcttacaggccaaattcgctcttagccgtacaatattactcaccggtgcgatgccccccatcgtaggtgaaggtggaaattaatgatccatcttgagaccacaggcccacaacagctaccagtttcctcaagggtccaccaaaaacgtaagcgcttacgtacatggtcgataagaaaaggcaatttgtagatgttaacatccaacgtcgctttcagcccggtggcgcgccgatatcctctcttaaggtagcgagctcttaattaatagggataacagggtaattaactataacggtcctaaggtagcgatggcaaacagctattatgggtattatgggtggttctttatgcggacactgacggctttatgcctgcaggtcgcgagcgatcgcggtaccgcccgggcgtcgacaggcctaagcttagcttgagcttggatcagattgtcgtttcccgccttcagtttaaactatcagtgtttgacaggatatattggcgggtaaacctaagagaaaagagcgtttattagaataacggatatttaaaagggcgtgaaaaggtttatccgttcgtccatttgtatgtgcatgccaaccacagggttcccctcgggatcaaagtactttgatccaacccctccgctgctatagtgcagtcggcttctgacgttcagtgcagccgtcttctgaaaacgacatgtcgcacaagtcctaagttacgcgacaggctgccgccctgcccttttcctggcgttttcttgtcgcgtgttttagtcgcataaagtagaatacttgcgactagaaccggagacattacgccatgaacaagagcgccgccgctggcctgctgggctatgcccgcgtcagcaccgacgaccaggacttgaccaaccaacgggccgaactgcacgcggccggctgcaccaagctgttttccgagaagatcaccggcaccaggcgcgaccgcccggagctggccaggatgcttgaccacctacgccctggcgacgttgtgacagtgaccaggctagaccgcctggcccgcagcacccgcgacctactggacattgccgagcgcatccaggaggccggcgcgggcctgcgtagcctggcagagccgtgggccgacaccaccacgccggccggccgcatggtgttgaccgtgttcgccggcattgccgagttcgagcgttccctaatcatcgaccgcacccggagcgggcgcgaggccgccaaggcccgaggcgtgaagtttggcccccgccctaccctcaccccggcacagatcgcgcacgcccgcgagctgatcgaccaggaaggccgcaccgtgaaagaggcggctgcactgcttggcgtgcatcgctcgaccctgtaccgcgcacttgagcgcagcgaggaagtgacgcccaccgaggccaggcggcgcggtgccttccgtgaggacgcattgaccgaggccgacgccctggcggccgccgagaatgaacgccaagaggaacaagcatgaaaccgcaccaggacggccaggacgaaccgtttttcattaccgaagagatcgaggcggagatgatcgcggccgggtacgtgttcgagccgcccgcgcacgtctcaaccgtgcggctgcatgaaatcctggccggtttgtctgatgccaagctggcggcctggccggccagcttggccgctgaagaaaccgagcgccgccgtctaaaaaggtgatgtgtatttgagtaaaacagcttgcgtcatgcggtcgctgcgtatatgatgcgatgagtaaataaacaaatacgcaaggggaacgcatgaaggttatcgctgtacttaaccagaaaggcgggtcaggcaagacgaccatcgcaacccatctagcccgcgccctgcaactcgccggggccgatgttctgttagtcgattccgatccccagggcagtgcccgcgattgggcggccgtgcgggaagatcaaccgctaaccgttgtcggcatcgaccgcccgacgattgaccgcgacgtgaaggccatcggccggcgcgacttcgtagtgatcgacggagcgccccaggcggcggacttggctgtgtccgcgatcaaggcagccgacttcgtgctgattccggtgcagccaagcccttacgacatatgggccaccgccgacctggtggagctggttaagcagcgcattgaggtcacggatggaaggctacaagcggcctttgtcgtgtcgcgggcgatcaaaggcacgcgcatcggcggtgaggttgccgaggcgctggccgggtacgagctgcccattcttgagtcccgtatcacgcagcgcgtgagctacccaggcactgccgccgccggcacaaccgttcttgaatcagaacccgagggcgacgctgcccgcgaggtccaggcgctggccgctgaaattaaatcaaaactcatttgagttaatgaggtaaagagaaaatgagcaaaagcacaaacacgctaagtgccggccgtccgagcgcacgcagcagcaaggctgcaacgttggccagcctggcagacacgccagccatgaagcgggtcaactttcagttgccggcggaggatcacaccaagctgaagatgtacgcggtacgccaaggcaagaccattaccgagctgctatctgaatacatcgcgcagctaccagagtaaatgagcaaatgaataaatgagtagatgaattttagcggctaaaggaggcggcatggaaaatcaagaacaaccaggcaccgacgccgtggaatgccccatgtgtggaggaacgggcggttggccaggcgtaagcggctgggttgtctgccggccctgcaatggcactggaacccccaagcccgaggaatcggcgtgacggtcgcaaaccatccggcccggtacaaatcggcgcggcgctgggtgatgacctggtggagaagttgaaggccgcgcaggccgcccagcggcaacgcatcgaggcagaagcacgccccggtgaatcgtggcaagcggccgctgatcgaatccgcaaagaatcccggcaaccgccggcagccggtgcgccgtcgattaggaagccgcccaagggcgacgagcaaccagattttttcgttccgatgctctatgacgtgggcacccgcgatagtcgcagcatcatggacgtggccgttttccgtctgtcgaagcgtgaccgacgagctggcgaggtgatccgctacgagcttccagacgggcacgtagaggtttccgcagggccggccggcatggccagtgtgtgggattacgacctggtactgatggcggtttcccatctaaccgaatccatgaaccgataccgggaagggaagggagacaagcccggccgcgtgttccgtccacacgttgcggacgtactcaagttctgccggcgagccgatggcggaaagcagaaagacgacctggtagaaacctgcattcggttaaacaccacgcacgttgccatgcagcgtacgaagaaggccaagaacggccgcctggtgacggtatccgagggtgaagccttgattagccgctacaagatcgtaaagagcgaaaccgggcggccggagtacatcgagatcgagctagctgattggatgtaccgcgagatcacagaaggcaagaacccggacgtgctgacggttcaccccgattactttttgatcgatcccggcatcggccgttttctctaccgcctggcacgccgcgccgcaggcaaggcagaagccagatggttgttcaagacgatctacgaacgcagtggcagcgccggagagttcaagaagttctgtttcaccgtgcgcaagctgatcgggtcaaatgacctgccggagtacgatttgaaggaggaggcggggcaggctggcccgatcctagtcatgcgctaccgcaacctgatcgagggcgaagcatccgccggttcctaatgtacggagcagatgctagggcaaattgccctagcaggggaaaaaggtcgaaaaggtctctttcctgtggatagcacgtacattgggaacccaaagccgtacattgggaaccggaacccgtacattgggaacccaaagccgtacattgggaaccggtcacacatgtaagtgactgatataaaagagaaaaaaggcgatttttccgcctaaaactctttaaaacttattaaaactcttaaaacccgcctggcctgtgcataactgtctggccagcgcacagccgaagagctgcaaaaagcgcctacccttcggtcgctgcgctccctacgccccgccgcttcgcgtcggcctatcgcggccgctggccgctcaaaaatggctggcctacggccaggcaatctaccagggcgcggacaagccgcgccgtcgccactcgaccgccggcgcccacatcaaggcaccctgcctcgcgcgtttcggtgatgacggtgaaaacctctgacacatgcagctcccggagacggtcacagcttgtctgtaagcggatgccgggagcagacaagcccgtcagggcgcgtcagcgggtgttggcgggtgtcggggcgcagccatgacccagtcacgtagcgatagcggagtgtatactggcttaactatgcggcatcagagcagattgtactgagagtgcaccatatgcggtgtgaaataccgcacagatgcgtaaggagaaaataccgcatcaggcgctcttccgcttcctcgctcactgactcgctgcgctcggtcgttcggctgcggcgagcggtatcagctcactcaaaggcggtaatacggttatccacagaatcaggggataacgcaggaaagaacatgtgagcaaaaggccagcaaaaggccaggaaccgtaaaaaggccgcgttgctggcgtttttccataggctccgcccccctgacgagcatcacaaaaatcgacgctcaagtcagaggtggcgaaacccgacaggactataaagataccaggcgtttccccctggaagctccctcgtgcgctctcctgttccgaccctgccgcttaccggatacctgtccgcctttctcccttcgggaagcgtggcgctttctcatagctcacgctgtaggtatctcagttcggtgtaggtcgttcgctccaagctgggctgtgtgcacgaaccccccgttcagcccgaccgctgcgccttatccggtaactatcgtcttgagtccaacccggtaagacacgacttatcgccactggcagcagccactggtaacaggattagcagagcgaggtatgtaggcggtgctacagagttcttgaagtggtggcctaactacggctacactagaaggacagtatttggtatctgcgctctgctgaagccagttaccttcggaaaaagagttggtagctcttgatccggcaaacaaaccaccgctggtagcggtggtttttttgtttgcaagcagcagattacgcgcagaaaaaaaggatctcaagaagatcctttgatcttttctacggggtctgacgctcagtggaacgaaaactcacgttaagggattttggtcatgcatgatatatctcccaatttgtgtagggcttattatgcacgcttaaaaataataaaagcagacttgacctgatagtttggctgtgagcaattatgtgcttagtgcatctaatcgcttgagttaacgccggcgaagcggcgtcggcttgaacgaatttctagctagacattatttgccgactaccttggtgatctcgcctttcacgtagtggacaaattcttccaactgatctgcgcgcgaggccaagcgatcttcttcttgtccaagataagcctgtctagcttcaagtatgacgggctgatactgggccggcaggcgctccattgcccagtcggcagcgacatccttcggcgcgattttgccggttactgcgctgtaccaaatgcgggacaacgtaagcactacatttcgctcatcgccagcccagtcgggcggcgagttccatagcgttaaggtttcatttagcgcctcaaatagatcctgttcaggaaccggatcaaagagttcctccgccgctggacctaccaaggcaacgctatgttctcttgcttttgtcagcaagatagccagatcaatgtcgatcgtggctggctcgaagatacctgcaagaatgtcattgcgctgccattctccaaattgcagttcgcgcttagctggataacgccacggaatgatgtcgtcgtgcacaacaatggtgacttctacagcgcggagaatctcgctctctccaggggaagccgaagtttccaaaaggtcgttgatcaaagctcgccgcgttgtttcatcaagccttacggtcaccgtaaccagcaaatcaatatcactgtgtggcttcaggccgccatccactgcggagccgtacaaatgtacggccagcaacgtcggttcgagatggcgctcgatgacgccaactacctctgatagttgagtcgatacttcggcgatcaccgcttcccccatgatgtttaactttgttttagggcgactgccctgctgcgtaacatcgttgctgctccataacatcaaacatcgacccacggcgtaacgcgcttgctgcttggatgcccgaggcatagactgtaccccaaaaaaacatgtcataacaagaagccatgaaaaccgccactgcgccgttaccaccgctgcgttcggtcaaggttctggaccagttgcgtgacggcagttacg

SEQ ID NO: 296 - DNA, 20 bp, Artificial Sequence
  COMP exon 13 NGS Primer, forward
  misc_feature: synthetic
agggatggagacggacatca

SEQ ID NO: 297 - DNA, 20 bp, Artificial Sequence
  COMP exon 13 NGS Primer, reverse
  misc_feature: synthetic
ctcggtgggctaaagtcagg

SEQ ID NO: 298 - DNA, 22 bp, Artificial Sequence
  CTLA4 exon 1 NGS Primer, forward
  misc_feature: synthetic
ttgctctacttcctgaagacct

SEQ ID NO: 299 - DNA, 20 bp, Artificial Sequence
  TLA4 exon 1 NGS Primer, reverse
  misc_feature: synthetic
agtctcactcacctttgcag

SEQ ID NO: 300 - DNA, 22 bp, Artificial Sequence
  SIGLEC10 exon 2 NGS Primer, forward
  misc_feature: synthetic
cagatgcaggatgagtcacagt

SEQ ID NO: 301 - DNA, 22 bp, Artificial Sequence
  SIGLEC10 exon 2 NGS Primer, reverse
  misc_feature: synthetic
ccaccccattccatacctgtta

SEQ ID NO: 302 - DNA, 16 bp, Artificial Sequence
  ITGB3 exon 1 NGS Primer, forward
  misc_feature: synthetic
cgagatgcgagcgcgg

SEQ ID NO: 303 - DNA, 17 bp, Artificial Sequence
  ITGB3 exon 1 NGS Primer, reverse
  misc_feature: synthetic
cggctcacccgagacct

SEQ ID NO: 304 - DNA, 20 bp, Artificial Sequence
  RP exon 1 NGS Primer, forward
  misc_feature: synthetic
cttcgcagcattcttgggtg

SEQ ID NO: 305 - DNA, 20 bp, Artificial Sequence
  RP exon 1 NGS Primer, reverse
  misc_feature: synthetic
agcgtgaggaagttgatggg

SEQ ID NO: 306 - protein, 12 aa, Artificial Sequence
  long linker
  misc_feature: synthetic
GGSAGGTGGSGG

SEQ ID NO: 307 - protein, 12 aa, Artificial Sequence
  positively charged linker
  misc_feature: synthetic
GGKARGKGGSGG

SEQ ID NO: 308 - protein, 529 aa, Artificial Sequence
  synthetic
  MISC_FEATURE: Cas14a1 MK005734
  misc_feature: Uncultured archaeon
MAKNTITKTLKLRIVRPYNSAEVEKIVADEKNNREKIALEKNKDKVKEACSKHLKVAAYCTTQVERNACLFCKARKLDDKFYQKLRGQFPDAVFWQEISEIFRQLQKQAAEIYNQSLIELYYEIFIKGKGIANASSVEHYLSDVCYTRAAELFKNAAIASGLRSKIKSNFRLKELKNMKSGLPTTKSDNFPIPLVKQKGGQYTGFEISNHNSDFIIKIPFGRWQVKKEIDKYRPWEKFDFEQVQKSPKPISLLLSTQRRKRNKGWSKDEGTEAEIKKVMNGDYQTSYIEVKRGSKIGEKSAWMLNLSIDVPKIDKGVDPSIIGGIDVGVKSPLVCAINNAFSRYSISDNDLFHFNKKMFARRRILLKKNRHKRAGHGAKNKLKPITILTEKSERFRKKLIERWACEIADFFIKNKVGTVQMENLESMKRKEDSYFNIRLRGFWPYAEMQNKIEFKLKQYGIEIRKVAPNNTSKTCSKCGHLNNYFNFEYRKKNKFPHFKCEKCNFKENADYNAALNISNPKLKSTKEEP

SEQ ID NO: 309 - protein, 564 aa, Artificial Sequence
  synthetic
  MISC_FEATURE: Cas14b5
  misc_feature: Uncultured archaeon
MARAKNQPYQKLTTTTGIKFKLDLSEEEGKRFDEYFSEYAKAVNFCAKVIYQLRKNLKFAGKKELAAKEWKFEISNCDFCNKQKEIYYKNIANGQKVCKGCHRTNFSDNAIRKKMIPVKGRKVESKFNIHNTTKKISGTHRHWAFEDAADIIESMDKQRKEKQKRLRREKRKLSYFFELFGDPAKRYELPKVGKQRVPRYLHKIIDKDSLTKKRGYSLSYIKNKIKISERNIERDEKSLRKASPIAFGARKIKMSKLDPKRAFDLENNVFKIPGKVIKGQYKFFGTNVANEHGKKFYKDRISKILAGKPKYFYLLRKKVAESDGNPIFEYYVQWSIDTETPAITSYDNILGIDAGITNLATTVLIPKNLSAEHCSHCGNNHVKPIFTKFFSGKELKAIKIKSRKQKYFLRGKHNKLVKIKRIRPIEQKVDGYCHVVSKQIVEMAKERNSCIALEKLEKPKKSKFRQRRREKYAVSMFVFKKLATFIKYKAAREGIEIIPVEPEGTSYTCSHCKNAQNNQRPYFKPNSKKSWTSMFKCGKCGIELNSDYNAAFNIAQKALNMTSA

SEQ ID NO: 310 - protein, 1300 aa, Francisella tularensis
  MISC_FEATURE: Cas12a
MSIYQEFVNKYSLSKTLRFELIPQGKTLENIKARGLILDDEKRAKDYKKAKQIIDKYHQFFIEEILSSVCISEDLLQNYSDVYFKLKKSDDDNLQKDFKSAKDTIKKQISEYIKDSEKFKNLFNQNLIDAKKGQESDLILWLKQSKDNGIELFKANSDITDIDEALEIIKSFKGWTTYFKGFHENRKNVYSSNDIPTSIIYRIVDDNLPKFLENKAKYESLKDKAPEAINYEQIKKDLAEELTFDIDYKTSEVNQRVFSLDEVFEIANFNNYLNQSGITKFNTIIGGKFVNGENTKRKGINEYINLYSQQINDKTLKKYKMSVLFKQILSDTESKSFVIDKLEDDSDVVTTMQSFYEQIAAFKTVEEKSIKETLSLLFDDLKAQKLDLSKIYFKNDKSLTDLSQQVFDDYSVIGTAVLEYITQQIAPKNLDNPSKKEQELIAKKTEKAKYLSLETIKLALEEFNKHRDIDKQCRFEEILANFAAIPMIFDEIAQNKDNLAQISIKYQNQGKKDLLQASAEDDVKAIKDLLDQTNNLLHKLKIFHISQSEDKANILDKDEHFYLVFEECYFELANIVPLYNKIRNYITQKPYSDEKFKLNFENSTLANGWDKNKEPDNTAILFIKDDKYYLGVMNKKNNKIFDDKAIKENKGEGYKKIVYKLLPGANKMLPKVFFSAKSIKFYNPSEDILRIRNHSTHTKNGSPQKGYEKFEFNIEDCRKFIDFYKQSISKHPEWKDFGFRFSDTQRYNSIDEFYREVENQGYKLTFENISESYIDSVVNQGKLYLFQIYNKDFSAYSKGRPNLHTLYWKALFDERNLQDVVYKLNGEAELFYRKQSIPKKITHPAKEAIANKNKDNPKKESVFEYDLIKDKRFTEDKFFFHCPITINFKSSGANKFNDEINLLLKEKANDVHILSIDRGERHLAYYTLVDGKGNIIKQDTFNIIGNDRMKTNYHDKLAAIEKDRDSARKDWKKINNIKEMKEGYLSQVVHEIAKLVIEYNAIVVFEDLNFGFKRGRFKVEKQVYQKLEKMLIEKLNYLVFKDNEFDKTGGVLRAYQLTAPFETFKKMGKQTGIIYYVPAGFTSKICPVTGFVNQLYPKYESVSKSQEFFSKFDKICYNLDKGYFEFSFDYKNFGDKAAKGKWTIASFGSRLINFRNSDKNHNWDTREVYPTKELEKLLKDYSIEYGHGECIKAAICGESDKKFFAKLTSVLNTILQMRNSKTGTELDYLISPVADVNGNFFDSRQAPKNMPQDADANGAYHIGLKGLMLLGRIKNNQEGKKLNLVIKNEEYFEFVQNRNN

SEQ ID NO: 311 - protein, 1307 aa, Artificial Sequence
  synthetic
  misc_feature: Acidaminococcus sp
MTQFEGFTNLYQVSKTLRFELIPQGKTLKHIQEQGFIEEDKARNDHYKELKPIIDRIYKTYADQCLQLVQLDWENLSAAIDSYRKEKTEETRNALIEEQATYRNAIHDYFIGRTDNLTDAINKRHAEIYKGLFKAELFNGKVLKQLGTVTTTEHENALLRSFDKFTTYFSGFYENRKNVFSAEDISTAIPHRIVQDNFPKFKENCHIFTRLITAVPSLREHFENVKKAIGIFVSTSIEEVFSFPFYNQLLTQTQIDLYNQLLGGISREAGTEKIKGLNEVLNLAIQKNDETAHIIASLPHRFIPLFKQILSDRNTLSFILEEFKSDEEVIQSFCKYKTLLRNENVLETAEALFNELNSIDLTHIFISHKKLETISSALCDHWDTLRNALYERRISELTGKITKSAKEKVQRSLKHEDINLQEIISAAGKELSEAFKQKTSEILSHAHAALDQPLPTTLKKQEEKEILKSQLDSLLGLYHLLDWFAVDESNEVDPEFSARLTGIKLEMEPSLSFYNKARNYATKKPYSVEKFKLNFQMPTLASGWDVNKEKNNGAILFVKNGLYYLGIMPKQKGRYKALSFEPTEKTSEGFDKMYYDYFPDAAKMIPKCSTQLKAVTAHFQTHTTPILLSNNFIEPLEITKEIYDLNNPEKEPKKFQTAYAKKTGDQKGYREALCKWIDFTRDFLSKYTKTTSIDLSSLRPSSQYKDLGEYYAELNPLLYHISFQRIAEKEIMDAVETGKLYLFQIYNKDFAKGHHGKPNLHTLYWTGLFSPENLAKTSIKLNGQAELFYRPKSRMKRMAHRLGEKMLNKKLKDQKTPIPDTLYQELYDYVNHRLSHDLSDEARALLPNVITKEVSHEIIKDRRFTSDKFFFHVPITLNYQAANSPSKFNQRVNAYLKEHPETPIIGIDRGERNLIYITVIDSTGKILEQRSLNTIQQFDYQKKLDNREKERVAARQAWSVVGTIKDLKQGYLSQVIHEIVDLMIHYQAVVVLENLNFGFKSKRTGIAEKAVYQQFEKMLIDKLNCLVLKDYPAEKVGGVLNPYQLTDQFTSFAKMGTQSGFLFYVPAPYTSKIDPLTGFVDPFVWKTIKNHESRKHFLEGFDFLHYDVKTGDFILHFKMNRNLSFQRGLPGFMPAWDIVFEKNETQFDAKGTPFIAGKRIVPVIENHRFTGRYRDLYPANELIALLEEKGIVFRDGSNILPKLLENDDSHAIDTMVALIRSVLQMRNSNAATGEDYINSPVRDLNGVCFDSRFQNPEWPMDADANGAYHIALKGQLLLNHLKESKDLKLQNGISNQDWLAYIQELRN

SEQ ID NO: 312 - protein, 1228 aa, Artificial Sequence
  synthetic
  misc_feature: Lachnospiraceae bacterium
AASKLEKFTNCYSLSKTLRFKAIPVGKTQENIDNKRLLVEDEKRAEDYKGVKKLLDRYYLSFINDVLHSIKLKNLNNYISLFRKKTRTEKENKELENLEINLRKEIAKAFKGAAGYKSLFKKDIIETILPEAADDKDEIALVNSFNGFTTAFTGFFDNRENMFSEEAKSTSIAFRCINENLTRYISNMDIFEKVDAIFDKHEVQEIKEKILNSDYDVEDFFEGEFFNFVLTQEGIDVYNAIIGGFVTESGEKIKGLNEYINLYNAKTKQALPKFKPLYKQVLSDRESLSFYGEGYTSDEEVLEVFRNTLNKNSEIFSSIKKLEKLFKNFDEYSSAGIFVKNGPAISTISKDIFGEWNLIRDKWNAEYDDIHLKKKAVVTEKYEDDRRKSFKKIGSFSLEQLQEYADADLSVVEKLKEIIIQKVDEIYKVYGSSEKLFDADFVLEKSLKKNDAVVAIMKDLLDSVKSFENYIKAFFGEGKETNRDESFYGDFVLAYDILLKVDHIYDAIRNYVTQKPYSKDKFKLYFQNPQFMGGWDKDKETDYRATILRYGSKYYLAIMDKKYAKCLQKIDKDDVNGNYEKINYKLLPGPNKMLPKVFFSKKWMAYYNPSEDIQKIYKNGTFKKGDMFNLNDCHKLIDFFKDSISRYPKWSNAYDFNFSETEKYKDIAGFYREVEEQGYKVSFESASKKEVDKLVEEGKLYMFQIYNKDFSDKSHGTPNLHTMYFKLLFDENNHGQIRLSGGAELFMRRASLKKEELVVHPANSPIANKNPDNPKKTTTLSYDVYKDKRFSEDQYELHIPIAINKCPKNIFKINTEVRVLLKHDDNPYVIGIDRGERNLLYIVVVDGKGNIVEQYSLNEIINNFNGIRIKTDYHSLLDKKEKERFEARQNWTSIENIKELKAGYISQVVHKICELVEKYDAVIALEDLNSGFKNSRVKVEKQVYQKFEKMLIDKLNYMVDKKSNPCATGGALKGYQITNKFESFKSMSTQNGFIFYIPAWLTSKIDPSTGFVNLLKTKYTSIADSKKFISSFDRIMYVPEEDLFEFALDYKNFSRTDADYIKKWKLYSYGNRIRIFAAAKKNNVFAWEEVCLTSAYKELFNKYGINYQQGDIRALLCEQSDKAFYSSFMALMSLMLQMRNSITGRTDVDFLISPVKNSDGIFYDSRNYEAQENAILPKNADANGAYNIARKVLWAIGQFKKAEDEKLDKVKIAISNKEWLEYAQTSVK

SEQ ID NO: 313 - protein, 1053 aa, Artificial Sequence
  synthetic
  misc_feature: Streptococcus aureus
MKRNYILGLDIGITSVGYGIIDYETRDVIDAGVRLFKEANVENNEGRRSKRGARRLKRRRRHRIQRVKKLLFDYNLLTDHSELSGINPYEARVKGLSQKLSEEEFSAALLHLAKRRGVHNVNEVEEDTGNELSTKEQISRNSKALEEKYVAELQLERLKKDGEVRGSINRFKTSDYVKEAKQLLKVQKAYHQLDQSFIDTYIDLLETRRTYYEGPGEGSPFGWKDIKEWYEMLMGHCTYFPEELRSVKYAYNADLYNALNDLNNLVITRDENEKLEYYEKFQIIENVFKQKKKPTLKQIAKEILVNEEDIKGYRVTSTGKPEFTNLKVYHDIKDITARKEIIENAELLDQIAKILTIYQSSEDIQEELTNLNSELTQEEIEQISNLKGYTGTHNLSLKAINLILDELWHTNDNQIAIFNRLKLVPKKVDLSQQKEIPTTLVDDFILSPVVKRSFIQSIKVINAIIKKYGLPNDIIIELAREKNSKDAQKMINEMQKRNRQTNERIEEIIRTTGKENAKYLIEKIKLHDMQEGKCLYSLEAIPLEDLLNNPFNYEVDHIIPRSVSFDNSFNNKVLVKQEENSKKGNRTPFQYLSSSDSKISYETFKKHILNLAKGKGRISKTKKEYLLEERDINRFSVQKDFINRNLVDTRYATRGLMNLLRSYFRVNNLDVKVKSINGGFTSFLRRKWKFKKERNKGYKHHAEDALIIANADFIFKEWKKLDKAKKVMENQMFEEKQAESMPEIETEQEYKEIFITPHQIKHIKDFKDYKYSHRVDKKPNRELINDTLYSTRKDDKGNTLIVNNLNGLYDKDNDKLKKLINKSPEKLLMYHHDPQTYQKLKLIMEQYGDEKNPLYKYYEETGNYLTKYSKKDNGPVIKKIKYYGNKLNAHLDITDDYPNSRNKVVKLSLKPYRFDVYLDNGVYKFVTVKNLDVIKKENYYEVNSKCYEEAKKLKKISNQAEFIASFYNNDLIKINGELYRVIGVNNDLLNRIEVNMIDITYREYLENMNDKRPPRIIKTIASKTQSIKKYSTDILGNLYEVKSKKHPQIIKKG

SEQ ID NO: 314 - protein, 1526 aa, Artificial Sequence
  dScCas9-FokI, HNHdelta, Zinc finger PAMBD loop replacement, 2NLS
  misc_feature: synthetic
MAVTAPKKKRKVGGSGSQLVKSELEEKKSELRHKLKYVPHEYIELIEIARNSTQDRILEMKVMEFFMKVYGYRGKHLGGSRKPDGAIYTVGSPIDYGVIVDTKAYSGGYNLPIGQADEMQRYVEENQTRNKHINPNEWWKVYPSSVTEFKFLFVSGHFKGNYKAQLTRLNHITNCNGAVLSVEELLIGGEMIKAGTLTLEEVRRKFNNGEINFSGSETPGTSESATPESGTEKKYSIGLAIGTNSVGWAVITDDYKVPSKKFKVLGNTNRKSIKKNLMGALLFDSGETAEATRLKRTARRRYTRRKNRIRYLQEIFANEMAKLDDSFFQRLEESFLVEEDKKNERHPIFGNLADEVAYHRNYPTIYHLRKKLADSPEKADLRLIYLALAHIIKFRGHFLIEGKLNAENSDVAKLFYQLIQTYNQLFEESPLDEIEVDAKGILSARLSKSKRLEKLIAVFPNEKKNGLFGNIIALALGLTPNFKSNFDLTEDAKLQLSKDTYDDDLDELLGQIGDQYADLFSAAKNLSDAILLSDILRSNSEVTKAPLSASMVKRYDEHHQDLALLKTLVRQQFPEKYAEIFKDDTKNGYAGYVGIGIKHRKRTTKLATQEEFYKFIKPILEKMDGAEELLAKLNRDDLLRKQRTFDNGSIPHQIHLKELHAILRRQEEFYPFLKENREKIEKILTFRIPYYVGPLARGNSRFAWLTRKSEEAITPWNFEEVVDKGASAQSFIERMTNFDEQLPNKKVLPKHSLLYEYFTVYNELTKVKYVTERMRKPEFLSGEQKKAIVDLLFKTNRKVTVKQLKEDYFKKIECFDSVEIIGVEDRFNASLGTYHDLLKIIKDKDFLDNEENEDILEDIVLTLTLFEDREMIEERLKTYAHLFDDKVMKQLKRRHYTGWGRLSRKMINGIRDKQSGKTILDFLKSDGFSNRNFMQLIHDDSLTFKEEIEKAQVSGQGDSLHEQIADLAGSPAIKKGILQTVKIVDELVKVMGHKPENIVIEMARENQTTTKGLQQSRERKKRGGSGGLSEADKAGFIKRQLVETRQITKHVARILDSRMNTKRDKNDKPIREVKVITLKSKLVSDFRKDFQLYKVRDINNYHHAHDAYLNAVVGTALIKKYPKLESEFVYGDYKVYDVRKMIAKSEQEIGKATAKRFFYSNIMNFFKTEVKLANGEIRKRPLIETNGETGEVVWNKEKDFATVRKVLAMPQVNIVKKTEVQTGGFSKESILSKRESAKLIPRKKGWDTRKYGGFGSPTVAYSILVVAKVEKGKAKKLKSVKVLVGITIMEKGSYEKDPIGFLEAKGYKDIKKELIFKLPKYSLFELENGRRRMLASATELQKANELVLPQHLVRLLYYTQNISATTGSNNLGYIEQHREEFKEIFEKIIDFSEKYILKNKVNSNLKSSFDEQFAVSDSILLSNSFVSLLKYTSFGAGGSAGGTGGSAPYRCPCRAGCPSLASMQAHMRGHSGGSGYQTVTEVLDATLIYQSITGLYETRTDLSQLGGDKRPAATKKAGQAKKKKGA

SEQ ID NO: 315 - protein, 1531 aa, Artificial Sequence
  dScCas9-FokI, HNHdelta, Zinc finger PAMBD loop replacement longer linkers, 2NLS
  misc_feature: synthetic
MAVTAPKKKRKVGGSGSQLVKSELEEKKSELRHKLKYVPHEYIELIEIARNSTQDRILEMKVMEFFMKVYGYRGKHLGGSRKPDGAIYTVGSPIDYGVIVDTKAYSGGYNLPIGQADEMQRYVEENQTRNKHINPNEWWKVYPSSVTEFKFLFVSGHFKGNYKAQLTRLNHITNCNGAVLSVEELLIGGEMIKAGTLTLEEVRRKFNNGEINFSGSETPGTSESATPESGTEKKYSIGLAIGTNSVGWAVITDDYKVPSKKFKVLGNTNRKSIKKNLMGALLFDSGETAEATRLKRTARRRYTRRKNRIRYLQEIFANEMAKLDDSFFQRLEESFLVEEDKKNERHPIFGNLADEVAYHRNYPTIYHLRKKLADSPEKADLRLIYLALAHIIKFRGHFLIEGKLNAENSDVAKLFYQLIQTYNQLFEESPLDEIEVDAKGILSARLSKSKRLEKLIAVFPNEKKNGLFGNIIALALGLTPNFKSNFDLTEDAKLQLSKDTYDDDLDELLGQIGDQYADLFSAAKNLSDAILLSDILRSNSEVTKAPLSASMVKRYDEHHQDLALLKTLVRQQFPEKYAEIFKDDTKNGYAGYVGIGIKHRKRTTKLATQEEFYKFIKPILEKMDGAEELLAKLNRDDLLRKQRTFDNGSIPHQIHLKELHAILRRQEEFYPFLKENREKIEKILTFRIPYYVGPLARGNSRFAWLTRKSEEAITPWNFEEVVDKGASAQSFIERMTNFDEQLPNKKVLPKHSLLYEYFTVYNELTKVKYVTERMRKPEFLSGEQKKAIVDLLFKTNRKVTVKQLKEDYFKKIECFDSVEIIGVEDRFNASLGTYHDLLKIIKDKDFLDNEENEDILEDIVLTLTLFEDREMIEERLKTYAHLFDDKVMKQLKRRHYTGWGRLSRKMINGIRDKQSGKTILDFLKSDGFSNRNFMQLIHDDSLTFKEEIEKAQVSGQGDSLHEQIADLAGSPAIKKGILQTVKIVDELVKVMGHKPENIVIEMARENQTTTKGLQQSRERKKRGGSGGLSEADKAGFIKRQLVETRQITKHVARILDSRMNTKRDKNDKPIREVKVITLKSKLVSDFRKDFQLYKVRDINNYHHAHDAYLNAVVGTALIKKYPKLESEFVYGDYKVYDVRKMIAKSEQEIGKATAKRFFYSNIMNFFKTEVKLANGEIRKRPLIETNGETGEVVWNKEKDFATVRKVLAMPQVNIVKKTEVQTGGFSKESILSKRESAKLIPRKKGWDTRKYGGFGSPTVAYSILVVAKVEKGKAKKLKSVKVLVGITIMEKGSYEKDPIGFLEAKGYKDIKKELIFKLPKYSLFELENGRRRMLASATELQKANELVLPQHLVRLLYYTQNISATTGSNNLGYIEQHREEFKEIFEKIIDFSEKYILKNKVNSNLKSSFDEQFAVSDSILLSNSFVSLLKYTSFGAGGSAGGTGGSAGGSGAPYRCPCRAGCPSLASMQAHMRGHSGGSGYQTVTEVLDATLIYQSITGLYETRTDLSQLGGDKRPAATKKAGQAKKKKGA

SEQ ID NO: 316 - protein, 1446 aa, Artificial Sequence
  dScCas9-FokI, HNHdelta, Lac repressor DBD PAMBD replacement whole replacement, 2NLS
  misc_feature: synthetic
MAVTAPKKKRKVGGSGSQLVKSELEEKKSELRHKLKYVPHEYIELIEIARNSTQDRILEMKVMEFFMKVYGYRGKHLGGSRKPDGAIYTVGSPIDYGVIVDTKAYSGGYNLPIGQADEMQRYVEENQTRNKHINPNEWWKVYPSSVTEFKFLFVSGHFKGNYKAQLTRLNHITNCNGAVLSVEELLIGGEMIKAGTLTLEEVRRKFNNGEINFSGSETPGTSESATPESGTEKKYSIGLAIGTNSVGWAVITDDYKVPSKKFKVLGNTNRKSIKKNLMGALLFDSGETAEATRLKRTARRRYTRRKNRIRYLQEIFANEMAKLDDSFFQRLEESFLVEEDKKNERHPIFGNLADEVAYHRNYPTIYHLRKKLADSPEKADLRLIYLALAHIIKFRGHFLIEGKLNAENSDVAKLFYQLIQTYNQLFEESPLDEIEVDAKGILSARLSKSKRLEKLIAVFPNEKKNGLFGNIIALALGLTPNFKSNFDLTEDAKLQLSKDTYDDDLDELLGQIGDQYADLFSAAKNLSDAILLSDILRSNSEVTKAPLSASMVKRYDEHHQDLALLKTLVRQQFPEKYAEIFKDDTKNGYAGYVGIGIKHRKRTTKLATQEEFYKFIKPILEKMDGAEELLAKLNRDDLLRKQRTFDNGSIPHQIHLKELHAILRRQEEFYPFLKENREKIEKILTFRIPYYVGPLARGNSRFAWLTRKSEEAITPWNFEEVVDKGASAQSFIERMTNFDEQLPNKKVLPKHSLLYEYFTVYNELTKVKYVTERMRKPEFLSGEQKKAIVDLLFKTNRKVTVKQLKEDYFKKIECFDSVEIIGVEDRFNASLGTYHDLLKIIKDKDFLDNEENEDILEDIVLTLTLFEDREMIEERLKTYAHLFDDKVMKQLKRRHYTGWGRLSRKMINGIRDKQSGKTILDFLKSDGFSNRNFMQLIHDDSLTFKEEIEKAQVSGQGDSLHEQIADLAGSPAIKKGILQTVKIVDELVKVMGHKPENIVIEMARENQTTTKGLQQSRERKKRGGSGGLSEADKAGFIKRQLVETRQITKHVARILDSRMNTKRDKNDKPIREVKVITLKSKLVSDFRKDFQLYKVRDINNYHHAHDAYLNAVVGTALIKKYPKLESEFVYGDYKVYDVRKMIAKSEQEIGKATAKRFFYSNIMNFFKTEVKLANGEIRKRPLIETNGETGEVVWNKEKDFATVRKVLAMPQVNIVKKTEVQTGGFSKESILSKRESAKLIPRKKGWDTRKYGGFGSPTVAYSILVVAKVEKGKAKKLKSVKVLVGITIMEKGSYEKDPIGFLEAKGYKDIKKELIFKLPKYSLFELENGRRRMLASATELQKAGGSGMKPVTLYDVAEYAGVSYQTVSRVVNQASHVSAKTREKVEAAMAELNGGSGYQTVTEVLDATLIYQSITGLYETRTDLSQLGGDKRPAATKKAGQAKKKK

SEQ ID NO: 317 - protein, 1466 aa, Artificial Sequence
  dScCas9-FokI, HNHdelta, SSO7D PAMBD replacement whole replacement, 2NLS
  misc_feature: synthetic
MAVTAPKKKRKVGGSGSQLVKSELEEKKSELRHKLKYVPHEYIELIEIARNSTQDRILEMKVMEFFMKVYGYRGKHLGGSRKPDGAIYTVGSPIDYGVIVDTKAYSGGYNLPIGQADEMQRYVEENQTRNKHINPNEWWKVYPSSVTEFKFLFVSGHFKGNYKAQLTRLNHITNCNGAVLSVEELLIGGEMIKAGTLTLEEVRRKFNNGEINFSGSETPGTSESATPESGTEKKYSIGLAIGTNSVGWAVITDDYKVPSKKFKVLGNTNRKSIKKNLMGALLFDSGETAEATRLKRTARRRYTRRKNRIRYLQEIFANEMAKLDDSFFQRLEESFLVEEDKKNERHPIFGNLADEVAYHRNYPTIYHLRKKLADSPEKADLRLIYLALAHIIKFRGHFLIEGKLNAENSDVAKLFYQLIQTYNQLFEESPLDEIEVDAKGILSARLSKSKRLEKLIAVFPNEKKNGLFGNIIALALGLTPNFKSNFDLTEDAKLQLSKDTYDDDLDELLGQIGDQYADLFSAAKNLSDAILLSDILRSNSEVTKAPLSASMVKRYDEHHQDLALLKTLVRQQFPEKYAEIFKDDTKNGYAGYVGIGIKHRKRTTKLATQEEFYKFIKPILEKMDGAEELLAKLNRDDLLRKQRTFDNGSIPHQIHLKELHAILRRQEEFYPFLKENREKIEKILTFRIPYYVGPLARGNSRFAWLTRKSEEAITPWNFEEVVDKGASAQSFIERMTNFDEQLPNKKVLPKHSLLYEYFTVYNELTKVKYVTERMRKPEFLSGEQKKAIVDLLFKTNRKVTVKQLKEDYFKKIECFDSVEIIGVEDRFNASLGTYHDLLKIIKDKDFLDNEENEDILEDIVLTLTLFEDREMIEERLKTYAHLFDDKVMKQLKRRHYTGWGRLSRKMINGIRDKQSGKTILDFLKSDGFSNRNFMQLIHDDSLTFKEEIEKAQVSGQGDSLHEQIADLAGSPAIKKGILQTVKIVDELVKVMGHKPENIVIEMARENQTTTKGLQQSRERKKRGGSGGLSEADKAGFIKRQLVETRQITKHVARILDSRMNTKRDKNDKPIREVKVITLKSKLVSDFRKDFQLYKVRDINNYHHAHDAYLNAVVGTALIKKYPKLESEFVYGDYKVYDVRKMIAKSEQEIGKATAKRFFYSNIMNFFKTEVKLANGEIRKRPLIETNGETGEVVWNKEKDFATVRKVLAMPQVNIVKKTEVQTGGFSKESILSKRESAKLIPRKKGWDTRKYGGFGSPTVAYSILVVAKVEKGKAKKLKSVKVLVGITIMEKGSYEKDPIGFLEAKGYKDIKKELIFKLPKYSLFELENGRRRMLASATELQKAGGSAGMATVKFKYKGEEKEVDISKIKKVWRVGKMISFTYDEGGGKTGRGAVSEKDAPKELLQMLEKQKKGGSAGYQTVTEVLDATLIYQSITGLYETRTDLSQLGGDKRPAATKKAGQAKKKK

SEQ ID NO: 318 - protein, 1571 aa, Artificial Sequence
  dScCas9-FokI, HNHdelta, STO7D PAMBD replacement loop replacement longer linker, 2NLS
  misc_feature: synthetic
MAVTAPKKKRKVGGSGSQLVKSELEEKKSELRHKLKYVPHEYIELIEIARNSTQDRILEMKVMEFFMKVYGYRGKHLGGSRKPDGAIYTVGSPIDYGVIVDTKAYSGGYNLPIGQADEMQRYVEENQTRNKHINPNEWWKVYPSSVTEFKFLFVSGHFKGNYKAQLTRLNHITNCNGAVLSVEELLIGGEMIKAGTLTLEEVRRKFNNGEINFSGSETPGTSESATPESGTEKKYSIGLAIGTNSVGWAVITDDYKVPSKKFKVLGNTNRKSIKKNLMGALLFDSGETAEATRLKRTARRRYTRRKNRIRYLQEIFANEMAKLDDSFFQRLEESFLVEEDKKNERHPIFGNLADEVAYHRNYPTIYHLRKKLADSPEKADLRLIYLALAHIIKFRGHFLIEGKLNAENSDVAKLFYQLIQTYNQLFEESPLDEIEVDAKGILSARLSKSKRLEKLIAVFPNEKKNGLFGNIIALALGLTPNFKSNFDLTEDAKLQLSKDTYDDDLDELLGQIGDQYADLFSAAKNLSDAILLSDILRSNSEVTKAPLSASMVKRYDEHHQDLALLKTLVRQQFPEKYAEIFKDDTKNGYAGYVGIGIKHRKRTTKLATQEEFYKFIKPILEKMDGAEELLAKLNRDDLLRKQRTFDNGSIPHQIHLKELHAILRRQEEFYPFLKENREKIEKILTFRIPYYVGPLARGNSRFAWLTRKSEEAITPWNFEEVVDKGASAQSFIERMTNFDEQLPNKKVLPKHSLLYEYFTVYNELTKVKYVTERMRKPEFLSGEQKKAIVDLLFKTNRKVTVKQLKEDYFKKIECFDSVEIIGVEDRFNASLGTYHDLLKIIKDKDFLDNEENEDILEDIVLTLTLFEDREMIEERLKTYAHLFDDKVMKQLKRRHYTGWGRLSRKMINGIRDKQSGKTILDFLKSDGFSNRNFMQLIHDDSLTFKEEIEKAQVSGQGDSLHEQIADLAGSPAIKKGILQTVKIVDELVKVMGHKPENIVIEMARENQTTTKGLQQSRERKKRGGSGGLSEADKAGFIKRQLVETRQITKHVARILDSRMNTKRDKNDKPIREVKVITLKSKLVSDFRKDFQLYKVRDINNYHHAHDAYLNAVVGTALIKKYPKLESEFVYGDYKVYDVRKMIAKSEQEIGKATAKRFFYSNIMNFFKTEVKLANGEIRKRPLIETNGETGEVVWNKEKDFATVRKVLAMPQVNIVKKTEVQTGGFSKESILSKRESAKLIPRKKGWDTRKYGGFGSPTVAYSILVVAKVEKGKAKKLKSVKVLVGITIMEKGSYEKDPIGFLEAKGYKDIKKELIFKLPKYSLFELENGRRRMLASATELQKANELVLPQHLVRLLYYTQNISATTGSNNLGYIEQHREEFKEIFEKIIDFSEKYILKNKVNSNLKSSFDEQFAVSDSILLSNSFVSLLKYTSFGAGGSAGGTGGSMVTVKFKYKGEEKEVDISKIKKVWRVGKMISFTYDDNGKTGRGAVSEKDAPKELLQMLEKSGKKGGSAGGTGGSYQTVTEVLDATLIYQSITGLYETRTDLSQLGGDKRPAATKKAGQAKKKKGA

SEQ ID NO: 319 - DNA, 593 bp, Artificial Sequence
  MPO.ex1.dcasffok.pamout
  misc_feature: synthetic
acgcgtaaaaaaaaactggccacgccccagccctcgtcccctcgtgaggggcaatcgttgggtgtttcgtggtctcatacagaacttataagattcccaaatccaaagacatttcacgtttatggtgatttcccagaacacatagcgacatgcaaatattgcagggcgccactcccctgtccctcacagccatcttcctgccagggcgcacgcgcgctgggtgttcccgcctagtgacactgggcccgcgattccttggagcgggttgatgacgtcagcgttcaaagagggcctatttcccatgattccttcatatttgcatatacgatacaaggctgttagagagataattggaattaatttgactgtaaacacaaagatattagtacaaaatacgtgacgtagaaagtaataatttcttgggtagtttgcagttttaaaattatgttttaaaatggactatcatatgcttaccgtaacttgaaagtatttcgatttcttggctttatatatcttgtggaaaggacgaaacacccaacgattgcccctcacgaggggacagctgcttctggccctagcatttttttacgcgt

SEQ ID NO: 320 - protein, 1684 aa, Artificial Sequence
  dScCas-FokI-HMGB1
  misc_feature: synthetic
MAPKKKRKVGGSGSQLVKSELEEKKSELRHKLKYVPHEYIELIEIARNSTQDRILEMKVMEFFMKVYGYRGKHLGGSRKPDGAIYTVGSPIDYGVIVDTKAYSGGYNLPIGQADEMQRYVEENQTRNKHINPNEWWKVYPSSVTEFKFLFVSGHFKGNYKAQLTRLNHITNCNGAVLSVEELLIGGEMIKAGTLTLEEVRRKFNNGEINFSGSETPGTSESATPESMEKKYSIGLAIGTNSVGWAVITDDYKVPSKKFKVLGNTNRKSIKKNLMGALLFDSGETAEATRLKRTARRRYTRRKNRIRYLQEIFANEMAKLDDSFFQRLEESFLVEEDKKNERHPIFGNLADEVAYHRNYPTIYHLRKKLADSPEKADLRLIYLALAHIIKFRGHFLIEGKLNAENSDVAKLFYQLIQTYNQLFEESPLDEIEVDAKGILSARLSKSKRLEKLIAVFPNEKKNGLFGNIIALALGLTPNFKSNFDLTEDAKLQLSKDTYDDDLDELLGQIGDQYADLFSAAKNLSDAILLSDILRSNSEVTKAPLSASMVKRYDEHHQDLALLKTLVRQQFPEKYAEIFKDDTKNGYAGYVGIGIKHRKRTTKLATQEEFYKFIKPILEKMDGAEELLAKLNRDDLLRKQRTFDNGSIPHQIHLKELHAILRRQEEFYPFLKENREKIEKILTFRIPYYVGPLARGNSRFAWLTRKSEEAITPWNFEEVVDKGASAQSFIERMTNFDEQLPNKKVLPKHSLLYEYFTVYNELTKVKYVTERMRKPEFLSGEQKKAIVDLLFKTNRKVTVKQLKEDYFKKIECFDSVEIIGVEDRFNASLGTYHDLLKIIKDKDFLDNEENEDILEDIVLTLTLFEDREMIEERLKTYAHLFDDKVMKQLKRRHYTGWGRLSRKMINGIRDKQSGKTILDFLKSDGFSNRNFMQLIHDDSLTFKEEIEKAQVSGQGDSLHEQIADLAGSPAIKKGILQTVKIVDELVKVMGHKPENIVIEMARENQTTTKGLQQSRERKKRIEEGIKELESQILKENPVENTQLQNEKLYLYYLQNGRDMYVDQELDINRLSDYDVDAIVPQSFIKDDSIDNKVLTRSVENRGKSDNVPSEEVVKKMKNYWRQLLNAKLITQRKFDNLTKAERGGLSEADKAGFIKRQLVETRQITKHVARILDSRMNTKRDKNDKPIREVKVITLKSKLVSDFRKDFQLYKVRDINNYHHAHDAYLNAVVGTALIKKYPKLESEFVYGDYKVYDVRKMIAKSEQEIGKATAKRFFYSNIMNFFKTEVKLANGEIRKRPLIETNGETGEVVWNKEKDFATVRKVLAMPQVNIVKKTEVQTGGFSKESILSKRESAKLIPRKKGWDTRKYGGFGSPTVAYSILVVAKVEKGKAKKLKSVKVLVGITIMEKGSYEKDPIGFLEAKGYKDIKKELIFKLPKYSLFELENGRRRMLASATELQKANELVLPQHLVRLLYYTQNISATTGSNNLGYIEQHREEFKEIFEKIIDFSEKYILKNKVNSNLKSSFDEQFAVSDSILLSNSFVSLLKYTSFGASGGFTFLDLDVKQGRLRYQTVTEVLDATLIYQSITGLYETRTDLSQLGGDGKGDPKKPRGKMSSYAFFVQTCREEHKKKHPDASVNFSEFSKKCSERWKTMSAKEKGKFEDMAKADKARYEREMKTYIPPKGE

SEQ ID NO: 321 - protein, 1687 aa, Artificial Sequence
  dScCas-FokI-HMGB3
  misc_feature: synthetic
MAPKKKRKVGGSGSQLVKSELEEKKSELRHKLKYVPHEYIELIEIARNSTQDRILEMKVMEFFMKVYGYRGKHLGGSRKPDGAIYTVGSPIDYGVIVDTKAYSGGYNLPIGQADEMQRYVEENQTRNKHINPNEWWKVYPSSVTEFKFLFVSGHFKGNYKAQLTRLNHITNCNGAVLSVEELLIGGEMIKAGTLTLEEVRRKFNNGEINFSGSETPGTSESATPESMEKKYSIGLAIGTNSVGWAVITDDYKVPSKKFKVLGNTNRKSIKKNLMGALLFDSGETAEATRLKRTARRRYTRRKNRIRYLQEIFANEMAKLDDSFFQRLEESFLVEEDKKNERHPIFGNLADEVAYHRNYPTIYHLRKKLADSPEKADLRLIYLALAHIIKFRGHFLIEGKLNAENSDVAKLFYQLIQTYNQLFEESPLDEIEVDAKGILSARLSKSKRLEKLIAVFPNEKKNGLFGNIIALALGLTPNFKSNFDLTEDAKLQLSKDTYDDDLDELLGQIGDQYADLFSAAKNLSDAILLSDILRSNSEVTKAPLSASMVKRYDEHHQDLALLKTLVRQQFPEKYAEIFKDDTKNGYAGYVGIGIKHRKRTTKLATQEEFYKFIKPILEKMDGAEELLAKLNRDDLLRKQRTFDNGSIPHQIHLKELHAILRRQEEFYPFLKENREKIEKILTFRIPYYVGPLARGNSRFAWLTRKSEEAITPWNFEEVVDKGASAQSFIERMTNFDEQLPNKKVLPKHSLLYEYFTVYNELTKVKYVTERMRKPEFLSGEQKKAIVDLLFKTNRKVTVKQLKEDYFKKIECFDSVEIIGVEDRFNASLGTYHDLLKIIKDKDFLDNEENEDILEDIVLTLTLFEDREMIEERLKTYAHLFDDKVMKQLKRRHYTGWGRLSRKMINGIRDKQSGKTILDFLKSDGFSNRNFMQLIHDDSLTFKEEIEKAQVSGQGDSLHEQIADLAGSPAIKKGILQTVKIVDELVKVMGHKPENIVIEMARENQTTTKGLQQSRERKKRIEEGIKELESQILKENPVENTQLQNEKLYLYYLQNGRDMYVDQELDINRLSDYDVDAIVPQSFIKDDSIDNKVLTRSVENRGKSDNVPSEEVVKKMKNYWRQLLNAKLITQRKFDNLTKAERGGLSEADKAGFIKRQLVETRQITKHVARILDSRMNTKRDKNDKPIREVKVITLKSKLVSDFRKDFQLYKVRDINNYHHAHDAYLNAVVGTALIKKYPKLESEFVYGDYKVYDVRKMIAKSEQEIGKATAKRFFYSNIMNFFKTEVKLANGEIRKRPLIETNGETGEVVWNKEKDFATVRKVLAMPQVNIVKKTEVQTGGFSKESILSKRESAKLIPRKKGWDTRKYGGFGSPTVAYSILVVAKVEKGKAKKLKSVKVLVGITIMEKGSYEKDPIGFLEAKGYKDIKKELIFKLPKYSLFELENGRRRMLASATELQKANELVLPQHLVRLLYYTQNISATTGSNNLGYIEQHREEFKEIFEKIIDFSEKYILKNKVNSNLKSSFDEQFAVSDSILLSNSFVSLLKYTSFGASGGFTFLDLDVKQGRLRYQTVTEVLDATLIYQSITGLYETRTDLSQLGGDGSSGSSGMAKGDPKKPKGKMSAYAFFVQTCREEHKKKNPEVPVNFAEFSKKCSERWKTMSGKEKSKFDEMAKADKVRYDREMKDYG

SEQ ID NO: 322 - protein, 1683 aa, Artificial Sequence
  dScCas-FokI-HMGB4
  misc_feature: synthetic
MAPKKKRKVGGSGSQLVKSELEEKKSELRHKLKYVPHEYIELIEIARNSTQDRILEMKVMEFFMKVYGYRGKHLGGSRKPDGAIYTVGSPIDYGVIVDTKAYSGGYNLPIGQADEMQRYVEENQTRNKHINPNEWWKVYPSSVTEFKFLFVSGHFKGNYKAQLTRLNHITNCNGAVLSVEELLIGGEMIKAGTLTLEEVRRKFNNGEINFSGSETPGTSESATPESMEKKYSIGLAIGTNSVGWAVITDDYKVPSKKFKVLGNTNRKSIKKNLMGALLFDSGETAEATRLKRTARRRYTRRKNRIRYLQEIFANEMAKLDDSFFQRLEESFLVEEDKKNERHPIFGNLADEVAYHRNYPTIYHLRKKLADSPEKADLRLIYLALAHIIKFRGHFLIEGKLNAENSDVAKLFYQLIQTYNQLFEESPLDEIEVDAKGILSARLSKSKRLEKLIAVFPNEKKNGLFGNIIALALGLTPNFKSNFDLTEDAKLQLSKDTYDDDLDELLGQIGDQYADLFSAAKNLSDAILLSDILRSNSEVTKAPLSASMVKRYDEHHQDLALLKTLVRQQFPEKYAEIFKDDTKNGYAGYVGIGIKHRKRTTKLATQEEFYKFIKPILEKMDGAEELLAKLNRDDLLRKQRTFDNGSIPHQIHLKELHAILRRQEEFYPFLKENREKIEKILTFRIPYYVGPLARGNSRFAWLTRKSEEAITPWNFEEVVDKGASAQSFIERMTNFDEQLPNKKVLPKHSLLYEYFTVYNELTKVKYVTERMRKPEFLSGEQKKAIVDLLFKTNRKVTVKQLKEDYFKKIECFDSVEIIGVEDRFNASLGTYHDLLKIIKDKDFLDNEENEDILEDIVLTLTLFEDREMIEERLKTYAHLFDDKVMKQLKRRHYTGWGRLSRKMINGIRDKQSGKTILDFLKSDGFSNRNFMQLIHDDSLTFKEEIEKAQVSGQGDSLHEQIADLAGSPAIKKGILQTVKIVDELVKVMGHKPENIVIEMARENQTTTKGLQQSRERKKRIEEGIKELESQILKENPVENTQLQNEKLYLYYLQNGRDMYVDQELDINRLSDYDVDAIVPQSFIKDDSIDNKVLTRSVENRGKSDNVPSEEVVKKMKNYWRQLLNAKLITQRKFDNLTKAERGGLSEADKAGFIKRQLVETRQITKHVARILDSRMNTKRDKNDKPIREVKVITLKSKLVSDFRKDFQLYKVRDINNYHHAHDAYLNAVVGTALIKKYPKLESEFVYGDYKVYDVRKMIAKSEQEIGKATAKRFFYSNIMNFFKTEVKLANGEIRKRPLIETNGETGEVVWNKEKDFATVRKVLAMPQVNIVKKTEVQTGGFSKESILSKRESAKLIPRKKGWDTRKYGGFGSPTVAYSILVVAKVEKGKAKKLKSVKVLVGITIMEKGSYEKDPIGFLEAKGYKDIKKELIFKLPKYSLFELENGRRRMLASATELQKANELVLPQHLVRLLYYTQNISATTGSNNLGYIEQHREEFKEIFEKIIDFSEKYILKNKVNSNLKSSFDEQFAVSDSILLSNSFVSLLKYTSFGASGGFTFLDLDVKQGRLRYQTVTEVLDATLIYQSITGLYETRTDLSQLGGDGGSGGKEIQLKPKANVSSYVHFLLNYRNKFKEQQPNTYVGFKEFSRKCSEKWRSISKHEKAKYEALAKLDKARYQEEMMNYV

SEQ ID NO: 323 - protein, 1714 aa, Artificial Sequence
  HMGN-dScCasFok, 2NLS variant, Construct #13213
  misc_feature: synthetic
MAVTPKKKRKVMPKRKVSSAEGAAKEEPKRRSARLSAKPPAKVEAKPKKAAAKDKSSDKKVQTKGKRGAKGKQAEVANQETKEDLPAENGETKTEESPASDEAGEKEAKSDVKSELEEKKSELRHKLKYVPHEYIELIEIARNSTQDRILEMKVMEFFMKVYGYRGKHLGGSRKPDGAIYTVGSPIDYGVIVDTKAYSGGYNLPIGQADEMQRYVEENQTRNKHINPNEWWKVYPSSVTEFKFLFVSGHFKGNYKAQLTRLNHITNCNGAVLSVEELLIGGEMIKAGTLTLEEVRRKFNNGEINFSGSETPGTSESATPEGTEKKYSIGLAIGTNSVGWAVITDDYKVPSKKFKVLGNTNRKSIKKNLMGALLFDSGETAEATRLKRTARRRYTRRKNRIRYLQEIFANEMAKLDDSFFQRLEESFLVEEDKKNERHPIFGNLADEVAYHRNYPTIYHLRKKLADSPEKADLRLIYLALAHIIKFRGHFLIEGKLNAENSDVAKLFYQLIQTYNQLFEESPLDEIEVDAKGILSARLSKSKRLEKLIAVFPNEKKNGLFGNIIALALGLTPNFKSNFDLTEDAKLQLSKDTYDDDLDELLGQIGDQYADLFSAAKNLSDAILLSDILRSNSEVTKAPLSASMVKRYDEHHQDLALLKTLVRQQFPEKYAEIFKDDTKNGYAGYVGIGIKHRKRTTKLATQEEFYKFIKPILEKMDGAEELLAKLNRDDLLRKQRTFDNGSIPHQIHLKELHAILRRQEEFYPFLKENREKIEKILTFRIPYYVGPLARGNSRFAWLTRKSEEAITPWNFEEVVDKGASAQSFIERMTNFDEQLPNKKVLPKHSLLYEYFTVYNELTKVKYVTERMRKPEFLSGEQKKAIVDLLFKTNRKVTVKQLKEDYFKKIECFDSVEIIGVEDRFNASLGTYHDLLKIIKDKDFLDNEENEDILEDIVLTLTLFEDREMIEERLKTYAHLFDDKVMKQLKRRHYTGWGRLSRKMINGIRDKQSGKTILDFLKSDGFSNRNFMQLIHDDSLTFKEEIEKAQVSGQGDSLHEQIADLAGSPAIKKGILQTVKIVDELVKVMGHKPENIVIEMARENQTTTKGLQQSRERKKRIEEGIKELESQILKENPVENTQLQNEKLYLYYLQNGRDMYVDQELDINRLSDYDVDAIVPQSFIKDDSIDNKVLTRSVENRGKSDNVPSEEVVKKMKNYWRQLLNAKLITQRKFDNLTKAERGGLSEADKAGFIKRQLVETRQITKHVARILDSRMNTKRDKNDKPIREVKVITLKSKLVSDFRKDFQLYKVRDINNYHHAHDAYLNAVVGTALIKKYPKLESEFVYGDYKVYDVRKMIAKSEQEIGKATAKRFFYSNIMNFFKTEVKLANGEIRKRPLIETNGETGEVVWNKEKDFATVRKVLAMPQVNIVKKTEVQTGGFSKESILSKRESAKLIPRKKGWDTRKYGGFGSPTVAYSILVVAKVEKGKAKKLKSVKVLVGITIMEKGSYEKDPIGFLEAKGYKDIKKELIFKLPKYSLFELENGRRRMLASATELQKANELVLPQHLVRLLYYTQNISATTGSNNLGYIEQHREEFKEIFEKIIDFSEKYILKNKVNSNLKSSFDEQFAVSDSILLSNSFVSLLKYTSFGASGGFTFLDLDVKQGRLRYQTVTEVLDATLIYQSITGLYETRTDLSQLGGDKRPAATKKAGQAKKKKGA

SEQ ID NO: 324 - protein, 100 aa, Homo sapiens
  MISC_FEATURE: HMGN domain
MPKRKVSSAEGAAKEEPKRRSARLSAKPPAKVEAKPKKAAAKDKSSDKKVQTKGKRGAKGKQAEVANQETKEDLPAENGETKTEESPASDEAGEKEAKSD

SEQ ID NO: 325 - DNA, 695 bp, Artificial Sequence
  GeneMsgRNA15E1
  misc_feature: synthetic
acgcgtaaaaaaaaagcaccgactcggtgccactttttcaagttgataacggactagccttattttaacttgctatttctagctctaaaaccttctggccctagcagggctggtgtttcgtggtctcatacagaacttataagattcccaaatccaaagacatttcacgtttatggtgatttcccagaacacatagcgacatgcaaatattgcagggcgccactcccctgtccctcacagccatcttcctgccagggcgcacgcgcgctgggtgttcccgcctagtgacactgggcccgcgattccttggagcgggttgatgacgtcagcgttcaaagagggcctatttcccatgattccttcatatttgcatatacgatacaaggctgttagagagataattggaattaatttgactgtaaacacaaagatattagtacaaaatacgtgacgtagaaagtaataatttcttgggtagtttgcagttttaaaattatgttttaaaatggactatcatatgcttaccgtaacttgaaagtatttcgatttcttggctttatatatcttgtggaaaggacgaaacacccacgccccagccctctgaaggttttagagctagaaatagcaagttaaaataaggctagtccgttatcaacttgaaaaagtggcaccgagtcggtgctttttttacgcgt

SEQ ID NO: 326 - DNA, 18 bp, Artificial Sequence
  PMOEx1-TGEE5 ddPCR reference probe
  misc_feature: synthetic
  misc_feature (9)..(9): g is modified with ZEN
tctcagatgcatggtgga

SEQ ID NO: 327 - DNA, 15 bp, Artificial Sequence
  PMOEx1-TGEE6 drop off probe
  misc_feature: synthetic
  misc_feature (8)..(8): c is a locked nucleic acid
  misc_feature (9)..(9): c is a locked nucleic acid
ctcctggccattctg

SEQ ID NO: 328 - DNA, 18 bp, Artificial Sequence
  PMOEx1 F2 FWD primer
  misc_feature: synthetic
ctgaggtacaaaggggga

SEQ ID NO: 329 - DNA, 17 bp, Artificial Sequence
  PMOEx2 R1 REV primer
  misc_feature: synthetic
ggtctctggaacacaac

SEQ ID NO: 330 - protein, 1623 aa, Artificial Sequence
  dScCasFok, 2NLS variant, Construct 12863 and 13185
  misc_feature: synthetic
MAVTAPKKKRKVGGSGSQLVKSELEEKKSELRHKLKYVPHEYIELIEIARNSTQDRILEMKVMEFFMKVYGYRGKHLGGSRKPDGAIYTVGSPIDYGVIVDTKAYSGGYNLPIGQADEMQRYVEENQTRNKHINPNEWWKVYPSSVTEFKFLFVSGHFKGNYKAQLTRLNHITNCNGAVLSVEELLIGGEMIKAGTLTLEEVRRKFNNGEINFSGSETPGTSESATPESGTEKKYSIGLAIGTNSVGWAVITDDYKVPSKKFKVLGNTNRKSIKKNLMGALLFDSGETAEATRLKRTARRRYTRRKNRIRYLQEIFANEMAKLDDSFFQRLEESFLVEEDKKNERHPIFGNLADEVAYHRNYPTIYHLRKKLADSPEKADLRLIYLALAHIIKFRGHFLIEGKLNAENSDVAKLFYQLIQTYNQLFEESPLDEIEVDAKGILSARLSKSKRLEKLIAVFPNEKKNGLFGNIIALALGLTPNFKSNFDLTEDAKLQLSKDTYDDDLDELLGQIGDQYADLFSAAKNLSDAILLSDILRSNSEVTKAPLSASMVKRYDEHHQDLALLKTLVRQQFPEKYAEIFKDDTKNGYAGYVGIGIKHRKRTTKLATQEEFYKFIKPILEKMDGAEELLAKLNRDDLLRKQRTFDNGSIPHQIHLKELHAILRRQEEFYPFLKENREKIEKILTFRIPYYVGPLARGNSRFAWLTRKSEEAITPWNFEEVVDKGASAQSFIERMTNFDEQLPNKKVLPKHSLLYEYFTVYNELTKVKYVTERMRKPEFLSGEQKKAIVDLLFKTNRKVTVKQLKEDYFKKIECFDSVEIIGVEDRFNASLGTYHDLLKIIKDKDFLDNEENEDILEDIVLTLTLFEDREMIEERLKTYAHLFDDKVMKQLKRRHYTGWGRLSRKMINGIRDKQSGKTILDFLKSDGFSNRNFMQLIHDDSLTFKEEIEKAQVSGQGDSLHEQIADLAGSPAIKKGILQTVKIVDELVKVMGHKPENIVIEMARENQTTTKGLQQSRERKKRIEEGIKELESQILKENPVENTQLQNEKLYLYYLQNGRDMYVDQELDINRLSDYDVDAIVPQSFIKDDSIDNKVLTRSVENRGKSDNVPSEEVVKKMKNYWRQLLNAKLITQRKFDNLTKAERGGLSEADKAGFIKRQLVETRQITKHVARILDSRMNTKRDKNDKPIREVKVITLKSKLVSDFRKDFQLYKVRDINNYHHAHDAYLNAVVGTALIKKYPKLESEFVYGDYKVYDVRKMIAKSEQEIGKATAKRFFYSNIMNFFKTEVKLANGEIRKRPLIETNGETGEVVWNKEKDFATVRKVLAMPQVNIVKKTEVQTGGFSKESILSKRESAKLIPRKKGWDTRKYGGFGSPTVAYSILVVAKVEKGKAKKLKSVKVLVGITIMEKGSYEKDPIGFLEAKGYKDIKKELIFKLPKYSLFELENGRRRMLASATELQKANELVLPQHLVRLLYYTQNISATTGSNNLGYIEQHREEFKEIFEKIIDFSEKYILKNKVNSNLKSSFDEQFAVSDSILLSNSFVSLLKYTSFGASGGFTFLDLDVKQGRLRYQTVTEVLDATLIYQSITGLYETRTDLSQLGGDKRPAATKKAGQAKKKKGA

SEQ ID NO: 331 - protein, 1504 aa, Artificial Sequence
  dScCasFok, 2NLS variant, Construct 13190
  misc_feature: synthetic
MAVTAPKKKRKVGGSGSQLVKSELEEKKSELRHKLKYVPHEYIELIEIARNSTQDRILEMKVMEFFMKVYGYRGKHLGGSRKPDGAIYTVGSPIDYGVIVDTKAYSGGYNLPIGQADEMQRYVEENQTRNKHINPNEWWKVYPSSVTEFKFLFVSGHFKGNYKAQLTRLNHITNCNGAVLSVEELLIGGEMIKAGTLTLEEVRRKFNNGEINFSGSETPGTSESATPESGTEKKYSIGLAIGTNSVGWAVITDDYKVPSKKFKVLGNTNRKSIKKNLMGALLFDSGETAEATRLKRTARRRYTRRKNRIRYLQEIFANEMAKLDDSFFQRLEESFLVEEDKKNERHPIFGNLADEVAYHRNYPTIYHLRKKLADSPEKADLRLIYLALAHIIKFRGHFLIEGKLNAENSDVAKLFYQLIQTYNQLFEESPLDEIEVDAKGILSARLSKSKRLEKLIAVFPNEKKNGLFGNIIALALGLTPNFKSNFDLTEDAKLQLSKDTYDDDLDELLGQIGDQYADLFSAAKNLSDAILLSDILRSNSEVTKAPLSASMVKRYDEHHQDLALLKTLVRQQFPEKYAEIFKDDTKNGYAGYVGIGIKHRKRTTKLATQEEFYKFIKPILEKMDGAEELLAKLNRDDLLRKQRTFDNGSIPHQIHLKELHAILRRQEEFYPFLKENREKIEKILTFRIPYYVGPLARGNSRFAWLTRKSEEAITPWNFEEVVDKGASAQSFIERMTNFDEQLPNKKVLPKHSLLYEYFTVYNELTKVKYVTERMRKPEFLSGEQKKAIVDLLFKTNRKVTVKQLKEDYFKKIECFDSVEIIGVEDRFNASLGTYHDLLKIIKDKDFLDNEENEDILEDIVLTLTLFEDREMIEERLKTYAHLFDDKVMKQLKRRHYTGWGRLSRKMINGIRDKQSGKTILDFLKSDGFSNRNFMQLIHDDSLTFKEEIEKAQVSGQGDSLHEQIADLAGSPAIKKGILQTVKIVDELVKVMGHKPENIVIEMARENQTTTKGLQQSRERKKRGGSGGLSEADKAGFIKRQLVETRQITKHVARILDSRMNTKRDKNDKPIREVKVITLKSKLVSDFRKDFQLYKVRDINNYHHAHDAYLNAVVGTALIKKYPKLESEFVYGDYKVYDVRKMIAKSEQEIGKATAKRFFYSNIMNFFKTEVKLANGEIRKRPLIETNGETGEVVWNKEKDFATVRKVLAMPQVNIVKKTEVQTGGFSKESILSKRESAKLIPRKKGWDTRKYGGFGSPTVAYSILVVAKVEKGKAKKLKSVKVLVGITIMEKGSYEKDPIGFLEAKGYKDIKKELIFKLPKYSLFELENGRRRMLASATELQKANELVLPQHLVRLLYYTQNISATTGSNNLGYIEQHREEFKEIFEKIIDFSEKYILKNKVNSNLKSSFDEQFAVSDSILLSNSFVSLLKYTSFGASGGFTFLDLDVKQGRLRYQTVTEVLDATLIYQSITGLYETRTDLSQLGGDKRPAATKKAGQAKKKKGA

SEQ ID NO: 332 - protein, 1398 aa, Artificial Sequence
  dScCasFok, HNHdelta, PAMBD whole delta, 2NLS variant, Construct 13191
  misc_feature: synthetic
MAVTAPKKKRKVGGSGSQLVKSELEEKKSELRHKLKYVPHEYIELIEIARNSTQDRILEMKVMEFFMKVYGYRGKHLGGSRKPDGAIYTVGSPIDYGVIVDTKAYSGGYNLPIGQADEMQRYVEENQTRNKHINPNEWWKVYPSSVTEFKFLFVSGHFKGNYKAQLTRLNHITNCNGAVLSVEELLIGGEMIKAGTLTLEEVRRKFNNGEINFSGSETPGTSESATPESGTEKKYSIGLAIGTNSVGWAVITDDYKVPSKKFKVLGNTNRKSIKKNLMGALLFDSGETAEATRLKRTARRRYTRRKNRIRYLQEIFANEMAKLDDSFFQRLEESFLVEEDKKNERHPIFGNLADEVAYHRNYPTIYHLRKKLADSPEKADLRLIYLALAHIIKFRGHFLIEGKLNAENSDVAKLFYQLIQTYNQLFEESPLDEIEVDAKGILSARLSKSKRLEKLIAVFPNEKKNGLFGNIIALALGLTPNFKSNFDLTEDAKLQLSKDTYDDDLDELLGQIGDQYADLFSAAKNLSDAILLSDILRSNSEVTKAPLSASMVKRYDEHHQDLALLKTLVRQQFPEKYAEIFKDDTKNGYAGYVGIGIKHRKRTTKLATQEEFYKFIKPILEKMDGAEELLAKLNRDDLLRKQRTFDNGSIPHQIHLKELHAILRRQEEFYPFLKENREKIEKILTFRIPYYVGPLARGNSRFAWLTRKSEEAITPWNFEEVVDKGASAQSFIERMTNFDEQLPNKKVLPKHSLLYEYFTVYNELTKVKYVTERMRKPEFLSGEQKKAIVDLLFKTNRKVTVKQLKEDYFKKIECFDSVEIIGVEDRFNASLGTYHDLLKIIKDKDFLDNEENEDILEDIVLTLTLFEDREMIEERLKTYAHLFDDKVMKQLKRRHYTGWGRLSRKMINGIRDKQSGKTILDFLKSDGFSNRNFMQLIHDDSLTFKEEIEKAQVSGQGDSLHEQIADLAGSPAIKKGILQTVKIVDELVKVMGHKPENIVIEMARENQTTTKGLQQSRERKKRGGSGGLSEADKAGFIKRQLVETRQITKHVARILDSRMNTKRDKNDKPIREVKVITLKSKLVSDFRKDFQLYKVRDINNYHHAHDAYLNAVVGTALIKKYPKLESEFVYGDYKVYDVRKMIAKSEQEIGKATAKRFFYSNIMNFFKTEVKLANGEIRKRPLIETNGETGEVVWNKEKDFATVRKVLAMPQVNIVKKTEVQTGGFSKESILSKRESAKLIPRKKGWDTRKYGGFGSPTVAYSILVVAKVEKGKAKKLKSVKVLVGITIMEKGSYEKDPIGFLEAKGYKDIKKELIFKLPKYSLFELENGRRRMLASATELQKAGGSGYQTVTEVLDATLIYQSITGLYETRTDLSQLGGDKRPAATKKAGQAKKKKGA

SEQ ID NO: 333 - protein, 1491 aa, Artificial Sequence
  dScCasFok, HNHdelta, PAMBD loop delta, 2NLS variant, Construct 13192
  misc_feature: synthetic
MAVTAPKKKRKVGGSGSQLVKSELEEKKSELRHKLKYVPHEYIELIEIARNSTQDRILEMKVMEFFMKVYGYRGKHLGGSRKPDGAIYTVGSPIDYGVIVDTKAYSGGYNLPIGQADEMQRYVEENQTRNKHINPNEWWKVYPSSVTEFKFLFVSGHFKGNYKAQLTRLNHITNCNGAVLSVEELLIGGEMIKAGTLTLEEVRRKFNNGEINFSGSETPGTSESATPESGTEKKYSIGLAIGTNSVGWAVITDDYKVPSKKFKVLGNTNRKSIKKNLMGALLFDSGETAEATRLKRTARRRYTRRKNRIRYLQEIFANEMAKLDDSFFQRLEESFLVEEDKKNERHPIFGNLADEVAYHRNYPTIYHLRKKLADSPEKADLRLIYLALAHIIKFRGHFLIEGKLNAENSDVAKLFYQLIQTYNQLFEESPLDEIEVDAKGILSARLSKSKRLEKLIAVFPNEKKNGLFGNIIALALGLTPNFKSNFDLTEDAKLQLSKDTYDDDLDELLGQIGDQYADLFSAAKNLSDAILLSDILRSNSEVTKAPLSASMVKRYDEHHQDLALLKTLVRQQFPEKYAEIFKDDTKNGYAGYVGIGIKHRKRTTKLATQEEFYKFIKPILEKMDGAEELLAKLNRDDLLRKQRTFDNGSIPHQIHLKELHAILRRQEEFYPFLKENREKIEKILTFRIPYYVGPLARGNSRFAWLTRKSEEAITPWNFEEVVDKGASAQSFIERMTNFDEQLPNKKVLPKHSLLYEYFTVYNELTKVKYVTERMRKPEFLSGEQKKAIVDLLFKTNRKVTVKQLKEDYFKKIECFDSVEIIGVEDRFNASLGTYHDLLKIIKDKDFLDNEENEDILEDIVLTLTLFEDREMIEERLKTYAHLFDDKVMKQLKRRHYTGWGRLSRKMINGIRDKQSGKTILDFLKSDGFSNRNFMQLIHDDSLTFKEEIEKAQVSGQGDSLHEQIADLAGSPAIKKGILQTVKIVDELVKVMGHKPENIVIEMARENQTTTKGLQQSRERKKRGGSGGLSEADKAGFIKRQLVETRQITKHVARILDSRMNTKRDKNDKPIREVKVITLKSKLVSDFRKDFQLYKVRDINNYHHAHDAYLNAVVGTALIKKYPKLESEFVYGDYKVYDVRKMIAKSEQEIGKATAKRFFYSNIMNFFKTEVKLANGEIRKRPLIETNGETGEVVWNKEKDFATVRKVLAMPQVNIVKKTEVQTGGFSKESILSKRESAKLIPRKKGWDTRKYGGFGSPTVAYSILVVAKVEKGKAKKLKSVKVLVGITIMEKGSYEKDPIGFLEAKGYKDIKKELIFKLPKYSLFELENGRRRMLASATELQKANELVLPQHLVRLLYYTQNISATTGSNNLGYIEQHREEFKEIFEKIIDFSEKYILKNKVNSNLKSSFDEQFAVSDSILLSNSFVSLLKYTSFGAGGSGYQTVTEVLDATLIYQSITGLYETRTDLSQLGGDKRPAATKKAGQAKKKKGA

SEQ ID NO: 334 - protein, 1650 aa, Artificial Sequence
  dScCasFok, Zinc finger PAMBD loop replacement longer linkers, 2NLS variant, Construct 12869
  misc_feature: synthetic
MAVTAPKKKRKVGGSGSQLVKSELEEKKSELRHKLKYVPHEYIELIEIARNSTQDRILEMKVMEFFMKVYGYRGKHLGGSRKPDGAIYTVGSPIDYGVIVDTKAYSGGYNLPIGQADEMQRYVEENQTRNKHINPNEWWKVYPSSVTEFKFLFVSGHFKGNYKAQLTRLNHITNCNGAVLSVEELLIGGEMIKAGTLTLEEVRRKFNNGEINFSGSETPGTSESATPESGTEKKYSIGLAIGTNSVGWAVITDDYKVPSKKFKVLGNTNRKSIKKNLMGALLFDSGETAEATRLKRTARRRYTRRKNRIRYLQEIFANEMAKLDDSFFQRLEESFLVEEDKKNERHPIFGNLADEVAYHRNYPTIYHLRKKLADSPEKADLRLIYLALAHIIKFRGHFLIEGKLNAENSDVAKLFYQLIQTYNQLFEESPLDEIEVDAKGILSARLSKSKRLEKLIAVFPNEKKNGLFGNIIALALGLTPNFKSNFDLTEDAKLQLSKDTYDDDLDELLGQIGDQYADLFSAAKNLSDAILLSDILRSNSEVTKAPLSASMVKRYDEHHQDLALLKTLVRQQFPEKYAEIFKDDTKNGYAGYVGIGIKHRKRTTKLATQEEFYKFIKPILEKMDGAEELLAKLNRDDLLRKQRTFDNGSIPHQIHLKELHAILRRQEEFYPFLKENREKIEKILTFRIPYYVGPLARGNSRFAWLTRKSEEAITPWNFEEVVDKGASAQSFIERMTNFDEQLPNKKVLPKHSLLYEYFTVYNELTKVKYVTERMRKPEFLSGEQKKAIVDLLFKTNRKVTVKQLKEDYFKKIECFDSVEIIGVEDRFNASLGTYHDLLKIIKDKDFLDNEENEDILEDIVLTLTLFEDREMIEERLKTYAHLFDDKVMKQLKRRHYTGWGRLSRKMINGIRDKQSGKTILDFLKSDGFSNRNFMQLIHDDSLTFKEEIEKAQVSGQGDSLHEQIADLAGSPAIKKGILQTVKIVDELVKVMGHKPENIVIEMARENQTTTKGLQQSRERKKRIEEGIKELESQILKENPVENTQLQNEKLYLYYLQNGRDMYVDQELDINRLSDYDVDAIVPQSFIKDDSIDNKVLTRSVENRGKSDNVPSEEVVKKMKNYWRQLLNAKLITQRKFDNLTKAERGGLSEADKAGFIKRQLVETRQITKHVARILDSRMNTKRDKNDKPIREVKVITLKSKLVSDFRKDFQLYKVRDINNYHHAHDAYLNAVVGTALIKKYPKLESEFVYGDYKVYDVRKMIAKSEQEIGKATAKRFFYSNIMNFFKTEVKLANGEIRKRPLIETNGETGEVVWNKEKDFATVRKVLAMPQVNIVKKTEVQTGGFSKESILSKRESAKLIPRKKGWDTRKYGGFGSPTVAYSILVVAKVEKGKAKKLKSVKVLVGITIMEKGSYEKDPIGFLEAKGYKDIKKELIFKLPKYSLFELENGRRRMLASATELQKANELVLPQHLVRLLYYTQNISATTGSNNLGYIEQHREEFKEIFEKIIDFSEKYILKNKVNSNLKSSFDEQFAVSDSILLSNSFVSLLKYTSFGAGGSAGGTGGSAGGSGAPYRCPCRAGCPSLASMQAHMRGHSGGSGYQTVTEVLDATLIYQSITGLYETRTDLSQLGGDKRPAATKKAGQAKKKKGA

SEQ ID NO: 335 - protein, 1567 aa, Artificial Sequence
  dScCasFok, Lac repressor DBD PAMBD whole replacement, 2NLS variant, Construct 12870
  misc_feature: synthetic
MAVTAPKKKRKVGGSGSQLVKSELEEKKSELRHKLKYVPHEYIELIEIARNSTQDRILEMKVMEFFMKVYGYRGKHLGGSRKPDGAIYTVGSPIDYGVIVDTKAYSGGYNLPIGQADEMQRYVEENQTRNKHINPNEWWKVYPSSVTEFKFLFVSGHFKGNYKAQLTRLNHITNCNGAVLSVEELLIGGEMIKAGTLTLEEVRRKFNNGEINFSGSETPGTSESATPESGTEKKYSIGLAIGTNSVGWAVITDDYKVPSKKFKVLGNTNRKSIKKNLMGALLFDSGETAEATRLKRTARRRYTRRKNRIRYLQEIFANEMAKLDDSFFQRLEESFLVEEDKKNERHPIFGNLADEVAYHRNYPTIYHLRKKLADSPEKADLRLIYLALAHIIKFRGHFLIEGKLNAENSDVAKLFYQLIQTYNQLFEESPLDEIEVDAKGILSARLSKSKRLEKLIAVFPNEKKNGLFGNIIALALGLTPNFKSNFDLTEDAKLQLSKDTYDDDLDELLGQIGDQYADLFSAAKNLSDAILLSDILRSNSEVTKAPLSASMVKRYDEHHQDLALLKTLVRQQFPEKYAEIFKDDTKNGYAGYVGIGIKHRKRTTKLATQEEFYKFIKPILEKMDGAEELLAKLNRDDLLRKQRTFDNGSIPHQIHLKELHAILRRQEEFYPFLKENREKIEKILTFRIPYYVGPLARGNSRFAWLTRKSEEAITPWNFEEVVDKGASAQSFIERMTNFDEQLPNKKVLPKHSLLYEYFTVYNELTKVKYVTERMRKPEFLSGEQKKAIVDLLFKTNRKVTVKQLKEDYFKKIECFDSVEIIGVEDRFNASLGTYHDLLKIIKDKDFLDNEENEDILEDIVLTLTLFEDREMIEERLKTYAHLFDDKVMKQLKRRHYTGWGRLSRKMINGIRDKQSGKTILDFLKSDGFSNRNFMQLIHDDSLTFKEEIEKAQVSGQGDSLHEQIADLAGSPAIKKGILQTVKIVDELVKVMGHKPENIVIEMARENQTTTKGLQQSRERKKRIEEGIKELESQILKENPVENTQLQNEKLYLYYLQNGRDMYVDQELDINRLSDYDVDAIVPQSFIKDDSIDNKVLTRSVENRGKSDNVPSEEVVKKMKNYWRQLLNAKLITQRKFDNLTKAERGGLSEADKAGFIKRQLVETRQITKHVARILDSRMNTKRDKNDKPIREVKVITLKSKLVSDFRKDFQLYKVRDINNYHHAHDAYLNAVVGTALIKKYPKLESEFVYGDYKVYDVRKMIAKSEQEIGKATAKRFFYSNIMNFFKTEVKLANGEIRKRPLIETNGETGEVVWNKEKDFATVRKVLAMPQVNIVKKTEVQTGGFSKESILSKRESAKLIPRKKGWDTRKYGGFGSPTVAYSILVVAKVEKGKAKKLKSVKVLVGITIMEKGSYEKDPIGFLEAKGYKDIKKELIFKLPKYSLFELENGRRRMLASATELQKAGGSGMKPVTLYDVAEYAGVSYQTVSRVVNQASHVSAKTREKVEAAMAELNGGSGYQTVTEVLDATLIYQSITGLYETRTDLSQLGGDKRPAATKKAGQAKKKKGA

SEQ ID NO: 336 - protein, 1587 aa, Artificial Sequence
  dScCasFok, SSO7D PAMBD whole replacement, 2NLS variant, Construct 12878
  misc_feature: synthetic
MAVTAPKKKRKVGGSGSQLVKSELEEKKSELRHKLKYVPHEYIELIEIARNSTQDRILEMKVMEFFMKVYGYRGKHLGGSRKPDGAIYTVGSPIDYGVIVDTKAYSGGYNLPIGQADEMQRYVEENQTRNKHINPNEWWKVYPSSVTEFKFLFVSGHFKGNYKAQLTRLNHITNCNGAVLSVEELLIGGEMIKAGTLTLEEVRRKFNNGEINFSGSETPGTSESATPESGTEKKYSIGLAIGTNSVGWAVITDDYKVPSKKFKVLGNTNRKSIKKNLMGALLFDSGETAEATRLKRTARRRYTRRKNRIRYLQEIFANEMAKLDDSFFQRLEESFLVEEDKKNERHPIFGNLADEVAYHRNYPTIYHLRKKLADSPEKADLRLIYLALAHIIKFRGHFLIEGKLNAENSDVAKLFYQLIQTYNQLFEESPLDEIEVDAKGILSARLSKSKRLEKLIAVFPNEKKNGLFGNIIALALGLTPNFKSNFDLTEDAKLQLSKDTYDDDLDELLGQIGDQYADLFSAAKNLSDAILLSDILRSNSEVTKAPLSASMVKRYDEHHQDLALLKTLVRQQFPEKYAEIFKDDTKNGYAGYVGIGIKHRKRTTKLATQEEFYKFIKPILEKMDGAEELLAKLNRDDLLRKQRTFDNGSIPHQIHLKELHAILRRQEEFYPFLKENREKIEKILTFRIPYYVGPLARGNSRFAWLTRKSEEAITPWNFEEVVDKGASAQSFIERMTNFDEQLPNKKVLPKHSLLYEYFTVYNELTKVKYVTERMRKPEFLSGEQKKAIVDLLFKTNRKVTVKQLKEDYFKKIECFDSVEIIGVEDRFNASLGTYHDLLKIIKDKDFLDNEENEDILEDIVLTLTLFEDREMIEERLKTYAHLFDDKVMKQLKRRHYTGWGRLSRKMINGIRDKQSGKTILDFLKSDGFSNRNFMQLIHDDSLTFKEEIEKAQVSGQGDSLHEQIADLAGSPAIKKGILQTVKIVDELVKVMGHKPENIVIEMARENQTTTKGLQQSRERKKRIEEGIKELESQILKENPVENTQLQNEKLYLYYLQNGRDMYVDQELDINRLSDYDVDAIVPQSFIKDDSIDNKVLTRSVENRGKSDNVPSEEVVKKMKNYWRQLLNAKLITQRKFDNLTKAERGGLSEADKAGFIKRQLVETRQITKHVARILDSRMNTKRDKNDKPIREVKVITLKSKLVSDFRKDFQLYKVRDINNYHHAHDAYLNAVVGTALIKKYPKLESEFVYGDYKVYDVRKMIAKSEQEIGKATAKRFFYSNIMNFFKTEVKLANGEIRKRPLIETNGETGEVVWNKEKDFATVRKVLAMPQVNIVKKTEVQTGGFSKESILSKRESAKLIPRKKGWDTRKYGGFGSPTVAYSILVVAKVEKGKAKKLKSVKVLVGITIMEKGSYEKDPIGFLEAKGYKDIKKELIFKLPKYSLFELENGRRRMLASATELQKAGGSAGMATVKFKYKGEEKEVDISKIKKVWRVGKMISFTYDEGGGKTGRGAVSEKDAPKELLQMLEKQKKGGSAGYQTVTEVLDATLIYQSITGLYETRTDLSQLGGDKRPAATKKAGQAKKKKGA

SEQ ID NO: 337 - protein, 1597 aa, Artificial Sequence
  dScCasFok, SSO7D PAMBD whole replacement longer linkers, 2NLS variant, Construct 12880
  misc_feature: synthetic
MAVTAPKKKRKVGGSGSQLVKSELEEKKSELRHKLKYVPHEYIELIEIARNSTQDRILEMKVMEFFMKVYGYRGKHLGGSRKPDGAIYTVGSPIDYGVIVDTKAYSGGYNLPIGQADEMQRYVEENQTRNKHINPNEWWKVYPSSVTEFKFLFVSGHFKGNYKAQLTRLNHITNCNGAVLSVEELLIGGEMIKAGTLTLEEVRRKFNNGEINFSGSETPGTSESATPESGTEKKYSIGLAIGTNSVGWAVITDDYKVPSKKFKVLGNTNRKSIKKNLMGALLFDSGETAEATRLKRTARRRYTRRKNRIRYLQEIFANEMAKLDDSFFQRLEESFLVEEDKKNERHPIFGNLADEVAYHRNYPTIYHLRKKLADSPEKADLRLIYLALAHIIKFRGHFLIEGKLNAENSDVAKLFYQLIQTYNQLFEESPLDEIEVDAKGILSARLSKSKRLEKLIAVFPNEKKNGLFGNIIALALGLTPNFKSNFDLTEDAKLQLSKDTYDDDLDELLGQIGDQYADLFSAAKNLSDAILLSDILRSNSEVTKAPLSASMVKRYDEHHQDLALLKTLVRQQFPEKYAEIFKDDTKNGYAGYVGIGIKHRKRTTKLATQEEFYKFIKPILEKMDGAEELLAKLNRDDLLRKQRTFDNGSIPHQIHLKELHAILRRQEEFYPFLKENREKIEKILTFRIPYYVGPLARGNSRFAWLTRKSEEAITPWNFEEVVDKGASAQSFIERMTNFDEQLPNKKVLPKHSLLYEYFTVYNELTKVKYVTERMRKPEFLSGEQKKAIVDLLFKTNRKVTVKQLKEDYFKKIECFDSVEIIGVEDRFNASLGTYHDLLKIIKDKDFLDNEENEDILEDIVLTLTLFEDREMIEERLKTYAHLFDDKVMKQLKRRHYTGWGRLSRKMINGIRDKQSGKTILDFLKSDGFSNRNFMQLIHDDSLTFKEEIEKAQVSGQGDSLHEQIADLAGSPAIKKGILQTVKIVDELVKVMGHKPENIVIEMARENQTTTKGLQQSRERKKRIEEGIKELESQILKENPVENTQLQNEKLYLYYLQNGRDMYVDQELDINRLSDYDVDAIVPQSFIKDDSIDNKVLTRSVENRGKSDNVPSEEVVKKMKNYWRQLLNAKLITQRKFDNLTKAERGGLSEADKAGFIKRQLVETRQITKHVARILDSRMNTKRDKNDKPIREVKVITLKSKLVSDFRKDFQLYKVRDINNYHHAHDAYLNAVVGTALIKKYPKLESEFVYGDYKVYDVRKMIAKSEQEIGKATAKRFFYSNIMNFFKTEVKLANGEIRKRPLIETNGETGEVVWNKEKDFATVRKVLAMPQVNIVKKTEVQTGGFSKESILSKRESAKLIPRKKGWDTRKYGGFGSPTVAYSILVVAKVEKGKAKKLKSVKVLVGITIMEKGSYEKDPIGFLEAKGYKDIKKELIFKLPKYSLFELENGRRRMLASATELQKAGGSAGGTGGSMATVKFKYKGEEKEVDISKIKKVWRVGKMISFTYDEGGGKTGRGAVSEKDAPKELLQMLEKQKKGGSAGGTGGSYQTVTEVLDATLIYQSITGLYETRTDLSQLGGDKRPAATKKAGQAKKKKGA

SEQ ID NO: 338 - protein, 1477 aa, Artificial Sequence
  dScCasFok, HNHdelta, SSO7D PAMBD whole replacement longer linkers, 2NLS variant, Construct 13207
  misc_feature: synthetic
MAVTAPKKKRKVGGSGSQLVKSELEEKKSELRHKLKYVPHEYIELIEIARNSTQDRILEMKVMEFFMKVYGYRGKHLGGSRKPDGAIYTVGSPIDYGVIVDTKAYSGGYNLPIGQADEMQRYVEENQTRNKHINPNEWWKVYPSSVTEFKFLFVSGHFKGNYKAQLTRLNHITNCNGAVLSVEELLIGGEMIKAGTLTLEEVRRKFNNGEINFSGSETPGTSESATPESGTEKKYSIGLAIGTNSVGWAVITDDYKVPSKKFKVLGNTNRKSIKKNLMGALLFDSGETAEATRLKRTARRRYTRRKNRIRYLQEIFANEMAKLDDSFFQRLEESFLVEEDKKNERHPIFGNLADEVAYHRNYPTIYHLRKKLADSPEKADLRLIYLALAHIIKFRGHFLIEGKLNAENSDVAKLFYQLIQTYNQLFEESPLDEIEVDAKGILSARLSKSKRLEKLIAVFPNEKKNGLFGNIIALALGLTPNFKSNFDLTEDAKLQLSKDTYDDDLDELLGQIGDQYADLFSAAKNLSDAILLSDILRSNSEVTKAPLSASMVKRYDEHHQDLALLKTLVRQQFPEKYAEIFKDDTKNGYAGYVGIGIKHRKRTTKLATQEEFYKFIKPILEKMDGAEELLAKLNRDDLLRKQRTFDNGSIPHQIHLKELHAILRRQEEFYPFLKENREKIEKILTFRIPYYVGPLARGNSRFAWLTRKSEEAITPWNFEEVVDKGASAQSFIERMTNFDEQLPNKKVLPKHSLLYEYFTVYNELTKVKYVTERMRKPEFLSGEQKKAIVDLLFKTNRKVTVKQLKEDYFKKIECFDSVEIIGVEDRFNASLGTYHDLLKIIKDKDFLDNEENEDILEDIVLTLTLFEDREMIEERLKTYAHLFDDKVMKQLKRRHYTGWGRLSRKMINGIRDKQSGKTILDFLKSDGFSNRNFMQLIHDDSLTFKEEIEKAQVSGQGDSLHEQIADLAGSPAIKKGILQTVKIVDELVKVMGHKPENIVIEMARENQTTTKGLQQSRERKKRGGSGGLSEADKAGFIKRQLVETRQITKHVARILDSRMNTKRDKNDKPIREVKVITLKSKLVSDFRKDFQLYKVRDINNYHHAHDAYLNAVVGTALIKKYPKLESEFVYGDYKVYDVRKMIAKSEQEIGKATAKRFFYSNIMNFFKTEVKLANGEIRKRPLIETNGETGEVVWNKEKDFATVRKVLAMPQVNIVKKTEVQTGGFSKESILSKRESAKLIPRKKGWDTRKYGGFGSPTVAYSILVVAKVEKGKAKKLKSVKVLVGITIMEKGSYEKDPIGFLEAKGYKDIKKELIFKLPKYSLFELENGRRRMLASATELQKAGGSAGGTGGSMATVKFKYKGEEKEVDISKIKKVWRVGKMISFTYDEGGGKTGRGAVSEKDAPKELLQMLEKQKKGGSAGGTGGSYQTVTEVLDATLIYQSITGLYETRTDLSQLGGDKRPAATKKAGQAKKKKG

SEQ ID NO: 339 - protein, 1690 aa, Artificial Sequence
  dScCasFok, STO7D PAMBD loop replacement longer linker, 2NLS variant, Construct 12885
  misc_feature: synthetic
MAVTAPKKKRKVGGSGSQLVKSELEEKKSELRHKLKYVPHEYIELIEIARNSTQDRILEMKVMEFFMKVYGYRGKHLGGSRKPDGAIYTVGSPIDYGVIVDTKAYSGGYNLPIGQADEMQRYVEENQTRNKHINPNEWWKVYPSSVTEFKFLFVSGHFKGNYKAQLTRLNHITNCNGAVLSVEELLIGGEMIKAGTLTLEEVRRKFNNGEINFSGSETPGTSESATPESGTEKKYSIGLAIGTNSVGWAVITDDYKVPSKKFKVLGNTNRKSIKKNLMGALLFDSGETAEATRLKRTARRRYTRRKNRIRYLQEIFANEMAKLDDSFFQRLEESFLVEEDKKNERHPIFGNLADEVAYHRNYPTIYHLRKKLADSPEKADLRLIYLALAHIIKFRGHFLIEGKLNAENSDVAKLFYQLIQTYNQLFEESPLDEIEVDAKGILSARLSKSKRLEKLIAVFPNEKKNGLFGNIIALALGLTPNFKSNFDLTEDAKLQLSKDTYDDDLDELLGQIGDQYADLFSAAKNLSDAILLSDILRSNSEVTKAPLSASMVKRYDEHHQDLALLKTLVRQQFPEKYAEIFKDDTKNGYAGYVGIGIKHRKRTTKLATQEEFYKFIKPILEKMDGAEELLAKLNRDDLLRKQRTFDNGSIPHQIHLKELHAILRRQEEFYPFLKENREKIEKILTFRIPYYVGPLARGNSRFAWLTRKSEEAITPWNFEEVVDKGASAQSFIERMTNFDEQLPNKKVLPKHSLLYEYFTVYNELTKVKYVTERMRKPEFLSGEQKKAIVDLLFKTNRKVTVKQLKEDYFKKIECFDSVEIIGVEDRFNASLGTYHDLLKIIKDKDFLDNEENEDILEDIVLTLTLFEDREMIEERLKTYAHLFDDKVMKQLKRRHYTGWGRLSRKMINGIRDKQSGKTILDFLKSDGFSNRNFMQLIHDDSLTFKEEIEKAQVSGQGDSLHEQIADLAGSPAIKKGILQTVKIVDELVKVMGHKPENIVIEMARENQTTTKGLQQSRERKKRIEEGIKELESQILKENPVENTQLQNEKLYLYYLQNGRDMYVDQELDINRLSDYDVDAIVPQSFIKDDSIDNKVLTRSVENRGKSDNVPSEEVVKKMKNYWRQLLNAKLITQRKFDNLTKAERGGLSEADKAGFIKRQLVETRQITKHVARILDSRMNTKRDKNDKPIREVKVITLKSKLVSDFRKDFQLYKVRDINNYHHAHDAYLNAVVGTALIKKYPKLESEFVYGDYKVYDVRKMIAKSEQEIGKATAKRFFYSNIMNFFKTEVKLANGEIRKRPLIETNGETGEVVWNKEKDFATVRKVLAMPQVNIVKKTEVQTGGFSKESILSKRESAKLIPRKKGWDTRKYGGFGSPTVAYSILVVAKVEKGKAKKLKSVKVLVGITIMEKGSYEKDPIGFLEAKGYKDIKKELIFKLPKYSLFELENGRRRMLASATELQKANELVLPQHLVRLLYYTQNISATTGSNNLGYIEQHREEFKEIFEKIIDFSEKYILKNKVNSNLKSSFDEQFAVSDSILLSNSFVSLLKYTSFGAGGSAGGTGGSMVTVKFKYKGEEKEVDISKIKKVWRVGKMISFTYDDNGKTGRGAVSEKDAPKELLQMLEKSGKKGGSAGGTGGSYQTVTEVLDATLIYQSITGLYETRTDLSQLGGDKRPAATKKAGQAKKKKGA

SEQ ID NO: 340 - protein, 1463 aa, Artificial Sequence
  dScCasFok, HNHdelta, HIV integrase DBD PAMBD replacement whole replacement longer linker, 2NLS variant, Construct 13203
  misc_feature: synthetic
MAVTAPKKKRKVGGSGSQLVKSELEEKKSELRHKLKYVPHEYIELIEIARNSTQDRILEMKVMEFFMKVYGYRGKHLGGSRKPDGAIYTVGSPIDYGVIVDTKAYSGGYNLPIGQADEMQRYVEENQTRNKHINPNEWWKVYPSSVTEFKFLFVSGHFKGNYKAQLTRLNHITNCNGAVLSVEELLIGGEMIKAGTLTLEEVRRKFNNGEINFSGSETPGTSESATPESGTEKKYSIGLAIGTNSVGWAVITDDYKVPSKKFKVLGNTNRKSIKKNLMGALLFDSGETAEATRLKRTARRRYTRRKNRIRYLQEIFANEMAKLDDSFFQRLEESFLVEEDKKNERHPIFGNLADEVAYHRNYPTIYHLRKKLADSPEKADLRLIYLALAHIIKFRGHFLIEGKLNAENSDVAKLFYQLIQTYNQLFEESPLDEIEVDAKGILSARLSKSKRLEKLIAVFPNEKKNGLFGNIIALALGLTPNFKSNFDLTEDAKLQLSKDTYDDDLDELLGQIGDQYADLFSAAKNLSDAILLSDILRSNSEVTKAPLSASMVKRYDEHHQDLALLKTLVRQQFPEKYAEIFKDDTKNGYAGYVGIGIKHRKRTTKLATQEEFYKFIKPILEKMDGAEELLAKLNRDDLLRKQRTFDNGSIPHQIHLKELHAILRRQEEFYPFLKENREKIEKILTFRIPYYVGPLARGNSRFAWLTRKSEEAITPWNFEEVVDKGASAQSFIERMTNFDEQLPNKKVLPKHSLLYEYFTVYNELTKVKYVTERMRKPEFLSGEQKKAIVDLLFKTNRKVTVKQLKEDYFKKIECFDSVEIIGVEDRFNASLGTYHDLLKIIKDKDFLDNEENEDILEDIVLTLTLFEDREMIEERLKTYAHLFDDKVMKQLKRRHYTGWGRLSRKMINGIRDKQSGKTILDFLKSDGFSNRNFMQLIHDDSLTFKEEIEKAQVSGQGDSLHEQIADLAGSPAIKKGILQTVKIVDELVKVMGHKPENIVIEMARENQTTTKGLQQSRERKKRGGSGGLSEADKAGFIKRQLVETRQITKHVARILDSRMNTKRDKNDKPIREVKVITLKSKLVSDFRKDFQLYKVRDINNYHHAHDAYLNAVVGTALIKKYPKLESEFVYGDYKVYDVRKMIAKSEQEIGKATAKRFFYSNIMNFFKTEVKLANGEIRKRPLIETNGETGEVVWNKEKDFATVRKVLAMPQVNIVKKTEVQTGGFSKESILSKRESAKLIPRKKGWDTRKYGGFGSPTVAYSILVVAKVEKGKAKKLKSVKVLVGITIMEKGSYEKDPIGFLEAKGYKDIKKELIFKLPKYSLFELENGRRRMLASATELQKAGGSAGGTGGSIQNFRVYYRDSRNPLWKGPAKLLWKGEGAWIQDNSDIKWPRRKAKIIRDGGSAGGTGGSYQTVTEVLDATLIYQSITGLYETRTDLSQLGGDKRPAATKKAGQAKKKKGA

SEQ ID NO: 341 - protein, 1556 aa, Artificial Sequence
  dScCasFok, HNHdelta, HIV integrase DBD PAMBD replacement loop replacement longer linker, 2NLS variant, Construct 13204
  misc_feature: synthetic
MAVTAPKKKRKVGGSGSQLVKSELEEKKSELRHKLKYVPHEYIELIEIARNSTQDRILEMKVMEFFMKVYGYRGKHLGGSRKPDGAIYTVGSPIDYGVIVDTKAYSGGYNLPIGQADEMQRYVEENQTRNKHINPNEWWKVYPSSVTEFKFLFVSGHFKGNYKAQLTRLNHITNCNGAVLSVEELLIGGEMIKAGTLTLEEVRRKFNNGEINFSGSETPGTSESATPESGTEKKYSIGLAIGTNSVGWAVITDDYKVPSKKFKVLGNTNRKSIKKNLMGALLFDSGETAEATRLKRTARRRYTRRKNRIRYLQEIFANEMAKLDDSFFQRLEESFLVEEDKKNERHPIFGNLADEVAYHRNYPTIYHLRKKLADSPEKADLRLIYLALAHIIKFRGHFLIEGKLNAENSDVAKLFYQLIQTYNQLFEESPLDEIEVDAKGILSARLSKSKRLEKLIAVFPNEKKNGLFGNIIALALGLTPNFKSNFDLTEDAKLQLSKDTYDDDLDELLGQIGDQYADLFSAAKNLSDAILLSDILRSNSEVTKAPLSASMVKRYDEHHQDLALLKTLVRQQFPEKYAEIFKDDTKNGYAGYVGIGIKHRKRTTKLATQEEFYKFIKPILEKMDGAEELLAKLNRDDLLRKQRTFDNGSIPHQIHLKELHAILRRQEEFYPFLKENREKIEKILTFRIPYYVGPLARGNSRFAWLTRKSEEAITPWNFEEVVDKGASAQSFIERMTNFDEQLPNKKVLPKHSLLYEYFTVYNELTKVKYVTERMRKPEFLSGEQKKAIVDLLFKTNRKVTVKQLKEDYFKKIECFDSVEIIGVEDRFNASLGTYHDLLKIIKDKDFLDNEENEDILEDIVLTLTLFEDREMIEERLKTYAHLFDDKVMKQLKRRHYTGWGRLSRKMINGIRDKQSGKTILDFLKSDGFSNRNFMQLIHDDSLTFKEEIEKAQVSGQGDSLHEQIADLAGSPAIKKGILQTVKIVDELVKVMGHKPENIVIEMARENQTTTKGLQQSRERKKRGGSGGLSEADKAGFIKRQLVETRQITKHVARILDSRMNTKRDKNDKPIREVKVITLKSKLVSDFRKDFQLYKVRDINNYHHAHDAYLNAVVGTALIKKYPKLESEFVYGDYKVYDVRKMIAKSEQEIGKATAKRFFYSNIMNFFKTEVKLANGEIRKRPLIETNGETGEVVWNKEKDFATVRKVLAMPQVNIVKKTEVQTGGFSKESILSKRESAKLIPRKKGWDTRKYGGFGSPTVAYSILVVAKVEKGKAKKLKSVKVLVGITIMEKGSYEKDPIGFLEAKGYKDIKKELIFKLPKYSLFELENGRRRMLASATELQKANELVLPQHLVRLLYYTQNISATTGSNNLGYIEQHREEFKEIFEKIIDFSEKYILKNKVNSNLKSSFDEQFAVSDSILLSNSFVSLLKYTSFGAGGSAGGTGGSIQNFRVYYRDSRNPLWKGPAKLLWKGEGAWIQDNSDIKWPRRKAKIIRDGGSAGGTGGSYQTVTEVLDATLIYQSITGLYETRTDLSQLGGDKRPAATKKAGQAKKKKGA

SEQ ID NO: 342 - protein, 1507 aa, Artificial Sequence
  dScCasFok, HNHdelta with longer linkers, 2NLS, Construct 14001
  misc_feature: synthetic
MAVTPKKKRKVGGSGSQLVKSELEEKKSELRHKLKYVPHEYIELIEIARNSTQDRILEMKVMEFFMKVYGYRGKHLGGSRKPDGAIYTVGSPIDYGVIVDTKAYSGGYNLPIGQADEMQRYVEENQTRNKHINPNEWWKVYPSSVTEFKFLFVSGHFKGNYKAQLTRLNHITNCNGAVLSVEELLIGGEMIKAGTLTLEEVRRKFNNGEINFSGSETPGTSESATPESMEKKYSIGLAIGTNSVGWAVITDDYKVPSKKFKVLGNTNRKSIKKNLMGALLFDSGETAEATRLKRTARRRYTRRKNRIRYLQEIFANEMAKLDDSFFQRLEESFLVEEDKKNERHPIFGNLADEVAYHRNYPTIYHLRKKLADSPEKADLRLIYLALAHIIKFRGHFLIEGKLNAENSDVAKLFYQLIQTYNQLFEESPLDEIEVDAKGILSARLSKSKRLEKLIAVFPNEKKNGLFGNIIALALGLTPNFKSNFDLTEDAKLQLSKDTYDDDLDELLGQIGDQYADLFSAAKNLSDAILLSDILRSNSEVTKAPLSASMVKRYDEHHQDLALLKTLVRQQFPEKYAEIFKDDTKNGYAGYVGIGIKHRKRTTKLATQEEFYKFIKPILEKMDGAEELLAKLNRDDLLRKQRTFDNGSIPHQIHLKELHAILRRQEEFYPFLKENREKIEKILTFRIPYYVGPLARGNSRFAWLTRKSEEAITPWNFEEVVDKGASAQSFIERMTNFDEQLPNKKVLPKHSLLYEYFTVYNELTKVKYVTERMRKPEFLSGEQKKAIVDLLFKTNRKVTVKQLKEDYFKKIECFDSVEIIGVEDRFNASLGTYHDLLKIIKDKDFLDNEENEDILEDIVLTLTLFEDREMIEERLKTYAHLFDDKVMKQLKRRHYTGWGRLSRKMINGIRDKQSGKTILDFLKSDGFSNRNFMQLIHDDSLTFKEEIEKAQVSGQGDSLHEQIADLAGSPAIKKGILQTVKIVDELVKVMGHKPENIVIEMARENQTTTKGLQQSRERKKRGGSAGGTGGSGGLSEADKAGFIKRQLVETRQITKHVARILDSRMNTKRDKNDKPIREVKVITLKSKLVSDFRKDFQLYKVRDINNYHHAHDAYLNAVVGTALIKKYPKLESEFVYGDYKVYDVRKMIAKSEQEIGKATAKRFFYSNIMNFFKTEVKLANGEIRKRPLIETNGETGEVVWNKEKDFATVRKVLAMPQVNIVKKTEVQTGGFSKESILSKRESAKLIPRKKGWDTRKYGGFGSPTVAYSILVVAKVEKGKAKKLKSVKVLVGITIMEKGSYEKDPIGFLEAKGYKDIKKELIFKLPKYSLFELENGRRRMLASATELQKANELVLPQHLVRLLYYTQNISATTGSNNLGYIEQHREEFKEIFEKIIDFSEKYILKNKVNSNLKSSFDEQFAVSDSILLSNSFVSLLKYTSFGASGGFTFLDLDVKQGRLRYQTVTEVLDATLIYQSITGLYETRTDLSQLGGDKRPAATKKAGQAKKKK

SEQ ID NO: 343 - protein, 1610 aa, Artificial Sequence
  dScCasFok, HNHdelta replaced with SSB, 2NLS, Construct 14002
  misc_feature: synthetic
MAVTPKKKRKVGGSGSQLVKSELEEKKSELRHKLKYVPHEYIELIEIARNSTQDRILEMKVMEFFMKVYGYRGKHLGGSRKPDGAIYTVGSPIDYGVIVDTKAYSGGYNLPIGQADEMQRYVEENQTRNKHINPNEWWKVYPSSVTEFKFLFVSGHFKGNYKAQLTRLNHITNCNGAVLSVEELLIGGEMIKAGTLTLEEVRRKFNNGEINFSGSETPGTSESATPESMEKKYSIGLAIGTNSVGWAVITDDYKVPSKKFKVLGNTNRKSIKKNLMGALLFDSGETAEATRLKRTARRRYTRRKNRIRYLQEIFANEMAKLDDSFFQRLEESFLVEEDKKNERHPIFGNLADEVAYHRNYPTIYHLRKKLADSPEKADLRLIYLALAHIIKFRGHFLIEGKLNAENSDVAKLFYQLIQTYNQLFEESPLDEIEVDAKGILSARLSKSKRLEKLIAVFPNEKKNGLFGNIIALALGLTPNFKSNFDLTEDAKLQLSKDTYDDDLDELLGQIGDQYADLFSAAKNLSDAILLSDILRSNSEVTKAPLSASMVKRYDEHHQDLALLKTLVRQQFPEKYAEIFKDDTKNGYAGYVGIGIKHRKRTTKLATQEEFYKFIKPILEKMDGAEELLAKLNRDDLLRKQRTFDNGSIPHQIHLKELHAILRRQEEFYPFLKENREKIEKILTFRIPYYVGPLARGNSRFAWLTRKSEEAITPWNFEEVVDKGASAQSFIERMTNFDEQLPNKKVLPKHSLLYEYFTVYNELTKVKYVTERMRKPEFLSGEQKKAIVDLLFKTNRKVTVKQLKEDYFKKIECFDSVEIIGVEDRFNASLGTYHDLLKIIKDKDFLDNEENEDILEDIVLTLTLFEDREMIEERLKTYAHLFDDKVMKQLKRRHYTGWGRLSRKMINGIRDKQSGKTILDFLKSDGFSNRNFMQLIHDDSLTFKEEIEKAQVSGQGDSLHEQIADLAGSPAIKKGILQTVKIVDELVKVMGHKPENIVIEMARENQTTTKGLQQSRERKKRGGSTTETFVKDIKPGLKNLNLIFIVLETGRVTKTKDGHEVRTCKVADKTGSINISVWDDVGNLIQPGDIIRLTKGYASVFKGCLTLYTGRGGDLQKIGEFCMVYSEVPNFSEPGGLSEADKAGFIKRQLVETRQITKHVARILDSRMNTKRDKNDKPIREVKVITLKSKLVSDFRKDFQLYKVRDINNYHHAHDAYLNAVVGTALIKKYPKLESEFVYGDYKVYDVRKMIAKSEQEIGKATAKRFFYSNIMNFFKTEVKLANGEIRKRPLIETNGETGEVVWNKEKDFATVRKVLAMPQVNIVKKTEVQTGGFSKESILSKRESAKLIPRKKGWDTRKYGGFGSPTVAYSILVVAKVEKGKAKKLKSVKVLVGITIMEKGSYEKDPIGFLEAKGYKDIKKELIFKLPKYSLFELENGRRRMLASATELQKANELVLPQHLVRLLYYTQNISATTGSNNLGYIEQHREEFKEIFEKIIDFSEKYILKNKVNSNLKSSFDEQFAVSDSILLSNSFVSLLKYTSFGASGGFTFLDLDVKQGRLRYQTVTEVLDATLIYQSITGLYETRTDLSQLGGDKRPAATKKAGQAKKKK

SEQ ID NO: 344 - protein, 1482 aa, Artificial Sequence
  dScCasFok, HNHdelta with larger deletion, 2NLS, Construct 14003
  misc_feature: synthetic
MAVTPKKKRKVGGSGSQLVKSELEEKKSELRHKLKYVPHEYIELIEIARNSTQDRILEMKVMEFFMKVYGYRGKHLGGSRKPDGAIYTVGSPIDYGVIVDTKAYSGGYNLPIGQADEMQRYVEENQTRNKHINPNEWWKVYPSSVTEFKFLFVSGHFKGNYKAQLTRLNHITNCNGAVLSVEELLIGGEMIKAGTLTLEEVRRKFNNGEINFSGSETPGTSESATPESMEKKYSIGLAIGTNSVGWAVITDDYKVPSKKFKVLGNTNRKSIKKNLMGALLFDSGETAEATRLKRTARRRYTRRKNRIRYLQEIFANEMAKLDDSFFQRLEESFLVEEDKKNERHPIFGNLADEVAYHRNYPTIYHLRKKLADSPEKADLRLIYLALAHIIKFRGHFLIEGKLNAENSDVAKLFYQLIQTYNQLFEESPLDEIEVDAKGILSARLSKSKRLEKLIAVFPNEKKNGLFGNIIALALGLTPNFKSNFDLTEDAKLQLSKDTYDDDLDELLGQIGDQYADLFSAAKNLSDAILLSDILRSNSEVTKAPLSASMVKRYDEHHQDLALLKTLVRQQFPEKYAEIFKDDTKNGYAGYVGIGIKHRKRTTKLATQEEFYKFIKPILEKMDGAEELLAKLNRDDLLRKQRTFDNGSIPHQIHLKELHAILRRQEEFYPFLKENREKIEKILTFRIPYYVGPLARGNSRFAWLTRKSEEAITPWNFEEVVDKGASAQSFIERMTNFDEQLPNKKVLPKHSLLYEYFTVYNELTKVKYVTERMRKPEFLSGEQKKAIVDLLFKTNRKVTVKQLKEDYFKKIECFDSVEIIGVEDRFNASLGTYHDLLKIIKDKDFLDNEENEDILEDIVLTLTLFEDREMIEERLKTYAHLFDDKVMKQLKRRHYTGWGRLSRKMINGIRDKQSGKTILDFLKSDGFSNRNFMQLIHDDSLTFKEEIEKAQVSGQGDSLHEQIADLAGSPAIKKGILQTVKIVDELVKVMGHKPENIVIEMARGGSGGLSEADKAGFIKRQLVETRQITKHVARILDSRMNTKRDKNDKPIREVKVITLKSKLVSDFRKDFQLYKVRDINNYHHAHDAYLNAVVGTALIKKYPKLESEFVYGDYKVYDVRKMIAKSEQEIGKATAKRFFYSNIMNFFKTEVKLANGEIRKRPLIETNGETGEVVWNKEKDFATVRKVLAMPQVNIVKKTEVQTGGFSKESILSKRESAKLIPRKKGWDTRKYGGFGSPTVAYSILVVAKVEKGKAKKLKSVKVLVGITIMEKGSYEKDPIGFLEAKGYKDIKKELIFKLPKYSLFELENGRRRMLASATELQKANELVLPQHLVRLLYYTQNISATTGSNNLGYIEQHREEFKEIFEKIIDFSEKYILKNKVNSNLKSSFDEQFAVSDSILLSNSFVSLLKYTSFGASGGFTFLDLDVKQGRLRYQTVTEVLDATLIYQSITGLYETRTDLSQLGGDKRPAATKKAGQAKKKK

SEQ ID NO: 345 - protein, 1610 aa, Artificial Sequence
  dScCas9-FokI-LoopDel, 2NLS variant
  misc_feature: synthetic
MAVTPKKKRKVGGSGSQLVKSELEEKKSELRHKLKYVPHEYIELIEIARNSTQDRILEMKVMEFFMKVYGYRGKHLGGSRKPDGAIYTVGSPIDYGVIVDTKAYSGGYNLPIGQADEMQRYVEENQTRNKHINPNEWWKVYPSSVTEFKFLFVSGHFKGNYKAQLTRLNHITNCNGAVLSVEELLIGGEMIKAGTLTLEEVRRKFNNGEINFSGSETPGTSESATPESGTEKKYSIGLAIGTNSVGWAVITDDYKVPSKKFKVLGNTNRKSIKKNLMGALLFDSGETAEATRLKRTARRRYTRRKNRIRYLQEIFANEMAKLDDSFFQRLEESFLVEEDKKNERHPIFGNLADEVAYHRNYPTIYHLRKKLADSPEKADLRLIYLALAHIIKFRGHFLIEGKLNAENSDVAKLFYQLIQTYNQLFEESPLDEIEVDAKGILSARLSKSKRLEKLIAVFPNEKKNGLFGNIIALALGLTPNFKSNFDLTEDAKLQLSKDTYDDDLDELLGQIGDQYADLFSAAKNLSDAILLSDILRSNSEVTKAPLSASMVKRYDEHHQDLALLKTLVRQQFPEKYAEIFKDDTKNGYAGYVGIGATQEEFYKFIKPILEKMDGAEELLAKLNRDDLLRKQRTFDNGSIPHQIHLKELHAILRRQEEFYPFLKENREKIEKILTFRIPYYVGPLARGNSRFAWLTRKSEEAITPWNFEEVVDKGASAQSFIERMTNFDEQLPNKKVLPKHSLLYEYFTVYNELTKVKYVTERMRKPEFLSGEQKKAIVDLLFKTNRKVTVKQLKEDYFKKIECFDSVEIIGVEDRFNASLGTYHDLLKIIKDKDFLDNEENEDILEDIVLTLTLFEDREMIEERLKTYAHLFDDKVMKQLKRRHYTGWGRLSRKMINGIRDKQSGKTILDFLKSDGFSNRNFMQLIHDDSLTFKEEIEKAQVSGQGDSLHEQIADLAGSPAIKKGILQTVKIVDELVKVMGHKPENIVIEMARENQTTTKGLQQSRERKKRIEEGIKELESQILKENPVENTQLQNEKLYLYYLQNGRDMYVDQELDINRLSDYDVDAIVPQSFIKDDSIDNKVLTRSVENRGKSDNVPSEEVVKKMKNYWRQLLNAKLITQRKFDNLTKAERGGLSEADKAGFIKRQLVETRQITKHVARILDSRMNTKRDKNDKPIREVKVITLKSKLVSDFRKDFQLYKVRDINNYHHAHDAYLNAVVGTALIKKYPKLESEFVYGDYKVYDVRKMIAKSEQEIGKATAKRFFYSNIMNFFKTEVKLANGEIRKRPLIETNGETGEVVWNKEKDFATVRKVLAMPQVNIVKKTEVQTGGFSKESILSKRESAKLIPRKKGWDTRKYGGFGSPTVAYSILVVAKVEKGKAKKLKSVKVLVGITIMEKGSYEKDPIGFLEAKGYKDIKKELIFKLPKYSLFELENGRRRMLASATELQKANELVLPQHLVRLLYYTQNISATTGSNNLGYIEQHREEFKEIFEKIIDFSEKYILKNKVNSNLKSSFDEQFAVSDSILLSNSFVSLLKYTSFGASGGFTFLDLDVKQGRLRYQTVTEVLDATLIYQSITGLYETRTDLSQLGGDKRPAATKKAGQAKKKK

SEQ ID NO: 346 - protein, 1620 aa, Artificial Sequence
  dScCas9-FokI-LoopQQ, 2NLS variant
  misc_feature: synthetic
MAVTPKKKRKVGGSGSQLVKSELEEKKSELRHKLKYVPHEYIELIEIARNSTQDRILEMKVMEFFMKVYGYRGKHLGGSRKPDGAIYTVGSPIDYGVIVDTKAYSGGYNLPIGQADEMQRYVEENQTRNKHINPNEWWKVYPSSVTEFKFLFVSGHFKGNYKAQLTRLNHITNCNGAVLSVEELLIGGEMIKAGTLTLEEVRRKFNNGEINFSGSETPGTSESATPESGTEKKYSIGLAIGTNSVGWAVITDDYKVPSKKFKVLGNTNRKSIKKNLMGALLFDSGETAEATRLKRTARRRYTRRKNRIRYLQEIFANEMAKLDDSFFQRLEESFLVEEDKKNERHPIFGNLADEVAYHRNYPTIYHLRKKLADSPEKADLRLIYLALAHIIKFRGHFLIEGKLNAENSDVAKLFYQLIQTYNQLFEESPLDEIEVDAKGILSARLSKSKRLEKLIAVFPNEKKNGLFGNIIALALGLTPNFKSNFDLTEDAKLQLSKDTYDDDLDELLGQIGDQYADLFSAAKNLSDAILLSDILRSNSEVTKAPLSASMVKRYDEHHQDLALLKTLVRQQFPEKYAEIFKDDTKNGYAGYVGIGIKHQKQTTKLATQEEFYKFIKPILEKMDGAEELLAKLNRDDLLRKQRTFDNGSIPHQIHLKELHAILRRQEEFYPFLKENREKIEKILTFRIPYYVGPLARGNSRFAWLTRKSEEAITPWNFEEVVDKGASAQSFIERMTNFDEQLPNKKVLPKHSLLYEYFTVYNELTKVKYVTERMRKPEFLSGEQKKAIVDLLFKTNRKVTVKQLKEDYFKKIECFDSVEIIGVEDRFNASLGTYHDLLKIIKDKDFLDNEENEDILEDIVLTLTLFEDREMIEERLKTYAHLFDDKVMKQLKRRHYTGWGRLSRKMINGIRDKQSGKTILDFLKSDGFSNRNFMQLIHDDSLTFKEEIEKAQVSGQGDSLHEQIADLAGSPAIKKGILQTVKIVDELVKVMGHKPENIVIEMARENQTTTKGLQQSRERKKRIEEGIKELESQILKENPVENTQLQNEKLYLYYLQNGRDMYVDQELDINRLSDYDVDAIVPQSFIKDDSIDNKVLTRSVENRGKSDNVPSEEVVKKMKNYWRQLLNAKLITQRKFDNLTKAERGGLSEADKAGFIKRQLVETRQITKHVARILDSRMNTKRDKNDKPIREVKVITLKSKLVSDFRKDFQLYKVRDINNYHHAHDAYLNAVVGTALIKKYPKLESEFVYGDYKVYDVRKMIAKSEQEIGKATAKRFFYSNIMNFFKTEVKLANGEIRKRPLIETNGETGEVVWNKEKDFATVRKVLAMPQVNIVKKTEVQTGGFSKESILSKRESAKLIPRKKGWDTRKYGGFGSPTVAYSILVVAKVEKGKAKKLKSVKVLVGITIMEKGSYEKDPIGFLEAKGYKDIKKELIFKLPKYSLFELENGRRRMLASATELQKANELVLPQHLVRLLYYTQNISATTGSNNLGYIEQHREEFKEIFEKIIDFSEKYILKNKVNSNLKSSFDEQFAVSDSILLSNSFVSLLKYTSFGASGGFTFLDLDVKQGRLRYQTVTEVLDATLIYQSITGLYETRTDLSQLGGDKRPAATKKAGQAKKKK

SEQ ID NO: 347 - protein, 1620 aa, Artificial Sequence
  dScCas9-FokI-LoopAA, 2NLS variant
  misc_feature: synthetic
MAVTPKKKRKVGGSGSQLVKSELEEKKSELRHKLKYVPHEYIELIEIARNSTQDRILEMKVMEFFMKVYGYRGKHLGGSRKPDGAIYTVGSPIDYGVIVDTKAYSGGYNLPIGQADEMQRYVEENQTRNKHINPNEWWKVYPSSVTEFKFLFVSGHFKGNYKAQLTRLNHITNCNGAVLSVEELLIGGEMIKAGTLTLEEVRRKFNNGEINFSGSETPGTSESATPESGTEKKYSIGLAIGTNSVGWAVITDDYKVPSKKFKVLGNTNRKSIKKNLMGALLFDSGETAEATRLKRTARRRYTRRKNRIRYLQEIFANEMAKLDDSFFQRLEESFLVEEDKKNERHPIFGNLADEVAYHRNYPTIYHLRKKLADSPEKADLRLIYLALAHIIKFRGHFLIEGKLNAENSDVAKLFYQLIQTYNQLFEESPLDEIEVDAKGILSARLSKSKRLEKLIAVFPNEKKNGLFGNIIALALGLTPNFKSNFDLTEDAKLQLSKDTYDDDLDELLGQIGDQYADLFSAAKNLSDAILLSDILRSNSEVTKAPLSASMVKRYDEHHQDLALLKTLVRQQFPEKYAEIFKDDTKNGYAGYVGIGIKHAKATTKLATQEEFYKFIKPILEKMDGAEELLAKLNRDDLLRKQRTFDNGSIPHQIHLKELHAILRRQEEFYPFLKENREKIEKILTFRIPYYVGPLARGNSRFAWLTRKSEEAITPWNFEEVVDKGASAQSFIERMTNFDEQLPNKKVLPKHSLLYEYFTVYNELTKVKYVTERMRKPEFLSGEQKKAIVDLLFKTNRKVTVKQLKEDYFKKIECFDSVEIIGVEDRFNASLGTYHDLLKIIKDKDFLDNEENEDILEDIVLTLTLFEDREMIEERLKTYAHLFDDKVMKQLKRRHYTGWGRLSRKMINGIRDKQSGKTILDFLKSDGFSNRNFMQLIHDDSLTFKEEIEKAQVSGQGDSLHEQIADLAGSPAIKKGILQTVKIVDELVKVMGHKPENIVIEMARENQTTTKGLQQSRERKKRIEEGIKELESQILKENPVENTQLQNEKLYLYYLQNGRDMYVDQELDINRLSDYDVDAIVPQSFIKDDSIDNKVLTRSVENRGKSDNVPSEEVVKKMKNYWRQLLNAKLITQRKFDNLTKAERGGLSEADKAGFIKRQLVETRQITKHVARILDSRMNTKRDKNDKPIREVKVITLKSKLVSDFRKDFQLYKVRDINNYHHAHDAYLNAVVGTALIKKYPKLESEFVYGDYKVYDVRKMIAKSEQEIGKATAKRFFYSNIMNFFKTEVKLANGEIRKRPLIETNGETGEVVWNKEKDFATVRKVLAMPQVNIVKKTEVQTGGFSKESILSKRESAKLIPRKKGWDTRKYGGFGSPTVAYSILVVAKVEKGKAKKLKSVKVLVGITIMEKGSYEKDPIGFLEAKGYKDIKKELIFKLPKYSLFELENGRRRMLASATELQKANELVLPQHLVRLLYYTQNISATTGSNNLGYIEQHREEFKEIFEKIIDFSEKYILKNKVNSNLKSSFDEQFAVSDSILLSNSFVSLLKYTSFGASGGFTFLDLDVKQGRLRYQTVTEVLDATLIYQSITGLYETRTDLSQLGGDKRPAATKKAGQAKKKK

SEQ ID NO: 348 - protein, 1609 aa, Artificial Sequence
  dScCasFok, ScLoop deltaSp, SV40+nucleoplasminNLS (TG14481)
  misc_feature: synthetic
MAVTPKKKRKVGGSGSQLVKSELEEKKSELRHKLKYVPHEYIELIEIARNSTQDRILEMKVMEFFMKVYGYRGKHLGGSRKPDGAIYTVGSPIDYGVIVDTKAYSGGYNLPIGQADEMQRYVEENQTRNKHINPNEWWKVYPSSVTEFKFLFVSGHFKGNYKAQLTRLNHITNCNGAVLSVEELLIGGEMIKAGTLTLEEVRRKFNNGEINFSGSETPGTSESATPESMEKKYSIGLAIGTNSVGWAVITDDYKVPSKKFKVLGNTNRKSIKKNLMGALLFDSGETAEATRLKRTARRRYTRRKNRIRYLQEIFANEMAKLDDSFFQRLEESFLVEEDKKNERHPIFGNLADEVAYHRNYPTIYHLRKKLADSPEKADLRLIYLALAHIIKFRGHFLIEGKLNAENSDVAKLFYQLIQTYNQLFEESPLDEIEVDAKGILSARLSKSKRLEKLIAVFPNEKKNGLFGNIIALALGLTPNFKSNFDLTEDAKLQLSKDTYDDDLDELLGQIGDQYADLFSAAKNLSDAILLSDILRSNSEVTKAPLSASMIKRYDEHHQDLTLLKALVRQQLPEKYKEIFFDQSKNGYAGYIDGGASQEEFYKFIKPILEKMDGTEELLVKLNREDLLRKQRTFDNGSIPHQIHLGELHAILRRQEDFYPFLKDNREKIEKILTFRIPYYVGPLARGNSRFAWMTRKSEETITPWNFEEVVDKGASAQSFIERMTNFDEQLPNKKVLPKHSLLYEYFTVYNELTKVKYVTERMRKPEFLSGEQKKAIVDLLFKTNRKVTVKQLKEDYFKKIECFDSVEIIGVEDRFNASLGTYHDLLKIIKDKDFLDNEENEDILEDIVLTLTLFEDREMIEERLKTYAHLFDDKVMKQLKRRHYTGWGRLSRKMINGIRDKQSGKTILDFLKSDGFSNRNFMQLIHDDSLTFKEEIEKAQVSGQGDSLHEQIADLAGSPAIKKGILQTVKIVDELVKVMGHKPENIVIEMARENQTTTKGLQQSRERKKRIEEGIKELESQILKENPVENTQLQNEKLYLYYLQNGRDMYVDQELDINRLSDYDVDAIVPQSFIKDDSIDNKVLTRSVENRGKSDNVPSEEVVKKMKNYWRQLLNAKLITQRKFDNLTKAERGGLSEADKAGFIKRQLVETRQITKHVARILDSRMNTKRDKNDKPIREVKVITLKSKLVSDFRKDFQLYKVRDINNYHHAHDAYLNAVVGTALIKKYPKLESEFVYGDYKVYDVRKMIAKSEQEIGKATAKRFFYSNIMNFFKTEVKLANGEIRKRPLIETNGETGEVVWNKEKDFATVRKVLAMPQVNIVKKTEVQTGGFSKESILSKRESAKLIPRKKGWDTRKYGGFGSPTVAYSILVVAKVEKGKAKKLKSVKVLVGITIMEKGSYEKDPIGFLEAKGYKDIKKELIFKLPKYSLFELENGRRRMLASATELQKANELVLPQHLVRLLYYTQNISATTGSNNLGYIEQHREEFKEIFEKIIDFSEKYILKNKVNSNLKSSFDEQFAVSDSILLSNSFVSLLKYTSFGASGGFTFLDLDVKQGRLRYQTVTEVLDATLIYQSITGLYETRTDLSQLGGDKRPAATKKAGQAKKKK

SEQ ID NO: 349 - protein, 1507 aa, Artificial Sequence
  dScCasFok, HNHdelta with positively charged linker, 2NLS, Construct 14004
  misc_feature: synthetic
MAVTPKKKRKVGGSGSQLVKSELEEKKSELRHKLKYVPHEYIELIEIARNSTQDRILEMKVMEFFMKVYGYRGKHLGGSRKPDGAIYTVGSPIDYGVIVDTKAYSGGYNLPIGQADEMQRYVEENQTRNKHINPNEWWKVYPSSVTEFKFLFVSGHFKGNYKAQLTRLNHITNCNGAVLSVEELLIGGEMIKAGTLTLEEVRRKFNNGEINFSGSETPGTSESATPESMEKKYSIGLAIGTNSVGWAVITDDYKVPSKKFKVLGNTNRKSIKKNLMGALLFDSGETAEATRLKRTARRRYTRRKNRIRYLQEIFANEMAKLDDSFFQRLEESFLVEEDKKNERHPIFGNLADEVAYHRNYPTIYHLRKKLADSPEKADLRLIYLALAHIIKFRGHFLIEGKLNAENSDVAKLFYQLIQTYNQLFEESPLDEIEVDAKGILSARLSKSKRLEKLIAVFPNEKKNGLFGNIIALALGLTPNFKSNFDLTEDAKLQLSKDTYDDDLDELLGQIGDQYADLFSAAKNLSDAILLSDILRSNSEVTKAPLSASMVKRYDEHHQDLALLKTLVRQQFPEKYAEIFKDDTKNGYAGYVGIGIKHRKRTTKLATQEEFYKFIKPILEKMDGAEELLAKLNRDDLLRKQRTFDNGSIPHQIHLKELHAILRRQEEFYPFLKENREKIEKILTFRIPYYVGPLARGNSRFAWLTRKSEEAITPWNFEEVVDKGASAQSFIERMTNFDEQLPNKKVLPKHSLLYEYFTVYNELTKVKYVTERMRKPEFLSGEQKKAIVDLLFKTNRKVTVKQLKEDYFKKIECFDSVEIIGVEDRFNASLGTYHDLLKIIKDKDFLDNEENEDILEDIVLTLTLFEDREMIEERLKTYAHLFDDKVMKQLKRRHYTGWGRLSRKMINGIRDKQSGKTILDFLKSDGFSNRNFMQLIHDDSLTFKEEIEKAQVSGQGDSLHEQIADLAGSPAIKKGILQTVKIVDELVKVMGHKPENIVIEMARENQTTTKGLQQSRERKKRGGKARGKGGSGGLSEADKAGFIKRQLVETRQITKHVARILDSRMNTKRDKNDKPIREVKVITLKSKLVSDFRKDFQLYKVRDINNYHHAHDAYLNAVVGTALIKKYPKLESEFVYGDYKVYDVRKMIAKSEQEIGKATAKRFFYSNIMNFFKTEVKLANGEIRKRPLIETNGETGEVVWNKEKDFATVRKVLAMPQVNIVKKTEVQTGGFSKESILSKRESAKLIPRKKGWDTRKYGGFGSPTVAYSILVVAKVEKGKAKKLKSVKVLVGITIMEKGSYEKDPIGFLEAKGYKDIKKELIFKLPKYSLFELENGRRRMLASATELQKANELVLPQHLVRLLYYTQNISATTGSNNLGYIEQHREEFKEIFEKIIDFSEKYILKNKVNSNLKSSFDEQFAVSDSILLSNSFVSLLKYTSFGASGGFTFLDLDVKQGRLRYQTVTEVLDATLIYQSITGLYETRTDLSQLGGDKRPAATKKAGQAKKKK

SEQ ID NO: 350 - protein, 1500 aa, Artificial Sequence
  dScCasFok, HNHdelta with short positively charged linker, 2NLS, Construct 14005
MAVTPKKKRKVGGSGSQLVKSELEEKKSELRHKLKYVPHEYIELIEIARNSTQDRILEMKVMEFFMKVYGYRGKHLGGSRKPDGAIYTVGSPIDYGVIVDTKAYSGGYNLPIGQADEMQRYVEENQTRNKHINPNEWWKVYPSSVTEFKFLFVSGHFKGNYKAQLTRLNHITNCNGAVLSVEELLIGGEMIKAGTLTLEEVRRKFNNGEINFSGSETPGTSESATPESMEKKYSIGLAIGTNSVGWAVITDDYKVPSKKFKVLGNTNRKSIKKNLMGALLFDSGETAEATRLKRTARRRYTRRKNRIRYLQEIFANEMAKLDDSFFQRLEESFLVEEDKKNERHPIFGNLADEVAYHRNYPTIYHLRKKLADSPEKADLRLIYLALAHIIKFRGHFLIEGKLNAENSDVAKLFYQLIQTYNQLFEESPLDEIEVDAKGILSARLSKSKRLEKLIAVFPNEKKNGLFGNIIALALGLTPNFKSNFDLTEDAKLQLSKDTYDDDLDELLGQIGDQYADLFSAAKNLSDAILLSDILRSNSEVTKAPLSASMVKRYDEHHQDLALLKTLVRQQFPEKYAEIFKDDTKNGYAGYVGIGIKHRKRTTKLATQEEFYKFIKPILEKMDGAEELLAKLNRDDLLRKQRTFDNGSIPHQIHLKELHAILRRQEEFYPFLKENREKIEKILTFRIPYYVGPLARGNSRFAWLTRKSEEAITPWNFEEVVDKGASAQSFIERMTNFDEQLPNKKVLPKHSLLYEYFTVYNELTKVKYVTERMRKPEFLSGEQKKAIVDLLFKTNRKVTVKQLKEDYFKKIECFDSVEIIGVEDRFNASLGTYHDLLKIIKDKDFLDNEENEDILEDIVLTLTLFEDREMIEERLKTYAHLFDDKVMKQLKRRHYTGWGRLSRKMINGIRDKQSGKTILDFLKSDGFSNRNFMQLIHDDSLTFKEEIEKAQVSGQGDSLHEQIADLAGSPAIKKGILQTVKIVDELVKVMGHKPENIVIEMARENQTTTKGLQQSRERKKRGKSKGLSEADKAGFIKRQLVETRQITKHVARILDSRMNTKRDKNDKPIREVKVITLKSKLVSDFRKDFQLYKVRDINNYHHAHDAYLNAVVGTALIKKYPKLESEFVYGDYKVYDVRKMIAKSEQEIGKATAKRFFYSNIMNFFKTEVKLANGEIRKRPLIETNGETGEVVWNKEKDFATVRKVLAMPQVNIVKKTEVQTGGFSKESILSKRESAKLIPRKKGWDTRKYGGFGSPTVAYSILVVAKVEKGKAKKLKSVKVLVGITIMEKGSYEKDPIGFLEAKGYKDIKKELIFKLPKYSLFELENGRRRMLASATELQKANELVLPQHLVRLLYYTQNISATTGSNNLGYIEQHREEFKEIFEKIIDFSEKYILKNKVNSNLKSSFDEQFAVSDSILLSNSFVSLLKYTSFGASGGFTFLDLDVKQGRLRYQTVTEVLDATLIYQSITGLYETRTDLSQLGGDKRPAATKKAGQAKKKK

SEQ ID NO: 351 - protein, 1493 aa, Artificial Sequence
  dScCasFok, HNHdelta with H-NS linker, 2NLS, Construct 14007
  misc_feature: synthetic
MAVTPKKKRKVGGSGSQLVKSELEEKKSELRHKLKYVPHEYIELIEIARNSTQDRILEMKVMEFFMKVYGYRGKHLGGSRKPDGAIYTVGSPIDYGVIVDTKAYSGGYNLPIGQADEMQRYVEENQTRNKHINPNEWWKVYPSSVTEFKFLFVSGHFKGNYKAQLTRLNHITNCNGAVLSVEELLIGGEMIKAGTLTLEEVRRKFNNGEINFSGSETPGTSESATPESMEKKYSIGLAIGTNSVGWAVITDDYKVPSKKFKVLGNTNRKSIKKNLMGALLFDSGETAEATRLKRTARRRYTRRKNRIRYLQEIFANEMAKLDDSFFQRLEESFLVEEDKKNERHPIFGNLADEVAYHRNYPTIYHLRKKLADSPEKADLRLIYLALAHIIKFRGHFLIEGKLNAENSDVAKLFYQLIQTYNQLFEESPLDEIEVDAKGILSARLSKSKRLEKLIAVFPNEKKNGLFGNIIALALGLTPNFKSNFDLTEDAKLQLSKDTYDDDLDELLGQIGDQYADLFSAAKNLSDAILLSDILRSNSEVTKAPLSASMVKRYDEHHQDLALLKTLVRQQFPEKYAEIFKDDTKNGYAGYVGIGIKHRKRTTKLATQEEFYKFIKPILEKMDGAEELLAKLNRDDLLRKQRTFDNGSIPHQIHLKELHAILRRQEEFYPFLKENREKIEKILTFRIPYYVGPLARGNSRFAWLTRKSEEAITPWNFEEVVDKGASAQSFIERMTNFDEQLPNKKVLPKHSLLYEYFTVYNELTKVKYVTERMRKPEFLSGEQKKAIVDLLFKTNRKVTVKQLKEDYFKKIECFDSVEIIGVEDRFNASLGTYHDLLKIIKDKDFLDNEENEDILEDIVLTLTLFEDREMIEERLKTYAHLFDDKVMKQLKRRHYTGWGRLSRKMINGIRDKQSGKTILDFLKSDGFSNRNFMQLIHDDSLTFKEEIEKAQVSGQGDSLHEQIADLAGSPAIKKGILQTVKIVDELVKVMGHKPENIVIEMARAAVKSGTKAKRAQRPGLSEADKAGFIKRQLVETRQITKHVARILDSRMNTKRDKNDKPIREVKVITLKSKLVSDFRKDFQLYKVRDINNYHHAHDAYLNAVVGTALIKKYPKLESEFVYGDYKVYDVRKMIAKSEQEIGKATAKRFFYSNIMNFFKTEVKLANGEIRKRPLIETNGETGEVVWNKEKDFATVRKVLAMPQVNIVKKTEVQTGGFSKESILSKRESAKLIPRKKGWDTRKYGGFGSPTVAYSILVVAKVEKGKAKKLKSVKVLVGITIMEKGSYEKDPIGFLEAKGYKDIKKELIFKLPKYSLFELENGRRRMLASATELQKANELVLPQHLVRLLYYTQNISATTGSNNLGYIEQHREEFKEIFEKIIDFSEKYILKNKVNSNLKSSFDEQFAVSDSILLSNSFVSLLKYTSFGASGGFTFLDLDVKQGRLRYQTVTEVLDATLIYQSITGLYETRTDLSQLGGDKRPAATKKAGQAKKKK

SEQ ID NO: 352 - protein, 871 aa, Artificial Sequence
  dScCasFok Intein, C-terminal, Construct 14806
  misc_feature: synthetic
MAVTKRTADGSEFESPKKKRKVIKIATRKYLGKQNVYDIGVERDHNFALKNGFIASNCFDSVEIIGVEDRFNASLGTYHDLLKIIKDKDFLDNEENEDILEDIVLTLTLFEDREMIEERLKTYAHLFDDKVMKQLKRRHYTGWGRLSRKMINGIRDKQSGKTILDFLKSDGFSNRNFMQLIHDDSLTFKEEIEKAQVSGQGDSLHEQIADLAGSPAIKKGILQTVKIVDELVKVMGHKPENIVIEMARENQTTTKGLQQSRERKKRIEEGIKELESQILKENPVENTQLQNEKLYLYYLQNGRDMYVDQELDINRLSDYDVDAIVPQSFIKDDSIDNKVLTRSVENRGKSDNVPSEEVVKKMKNYWRQLLNAKLITQRKFDNLTKAERGGLSEADKAGFIKRQLVETRQITKHVARILDSRMNTKRDKNDKPIREVKVITLKSKLVSDFRKDFQLYKVRDINNYHHAHDAYLNAVVGTALIKKYPKLESEFVYGDYKVYDVRKMIAKSEQEIGKATAKRFFYSNIMNFFKTEVKLANGEIRKRPLIETNGETGEVVWNKEKDFATVRKVLAMPQVNIVKKTEVQTGGFSKESILSKRESAKLIPRKKGWDTRKYGGFGSPTVAYSILVVAKVEKGKAKKLKSVKVLVGITIMEKGSYEKDPIGFLEAKGYKDIKKELIFKLPKYSLFELENGRRRMLASATELQKANELVLPQHLVRLLYYTQNISATTGSNNLGYIEQHREEFKEIFEKIIDFSEKYILKNKVNSNLKSSFDEQFAVSDSILLSNSFVSLLKYTSFGASGGFTFLDLDVKQGRLRYQTVTEVLDATLIYQSITGLYETRTDLSQLGGDSGGSKRTADGSEFESPKKKRKV

SEQ ID NO: 353 - protein, 932 aa, Artificial Sequence
  dScCasFok Intein, N-terminal, Construct 14870
  misc_feature: synthetic
MAPKKKRKVGGSGSQLVKSELEEKKSELRHKLKYVPHEYIELIEIARNSTQDRILEMKVMEFFMKVYGYRGKHLGGSRKPDGAIYTVGSPIDYGVIVDTKAYSGGYNLPIGQADEMQRYVEENQTRNKHINPNEWWKVYPSSVTEFKFLFVSGHFKGNYKAQLTRLNHITNCNGAVLSVEELLIGGEMIKAGTLTLEEVRRKFNNGEINFSGSETPGTSESATPESMEKKYSIGLAIGTNSVGWAVITDDYKVPSKKFKVLGNTNRKSIKKNLMGALLFDSGETAEATRLKRTARRRYTRRKNRIRYLQEIFANEMAKLDDSFFQRLEESFLVEEDKKNERHPIFGNLADEVAYHRNYPTIYHLRKKLADSPEKADLRLIYLALAHIIKFRGHFLIEGKLNAENSDVAKLFYQLIQTYNQLFEESPLDEIEVDAKGILSARLSKSKRLEKLIAVFPNEKKNGLFGNIIALALGLTPNFKSNFDLTEDAKLQLSKDTYDDDLDELLGQIGDQYADLFSAAKNLSDAILLSDILRSNSEVTKAPLSASMVKRYDEHHQDLALLKTLVRQQFPEKYAEIFKDDTKNGYAGYVGIGIKHRKRTTKLATQEEFYKFIKPILEKMDGAEELLAKLNRDDLLRKQRTFDNGSIPHQIHLKELHAILRRQEEFYPFLKENREKIEKILTFRIPYYVGPLARGNSRFAWLTRKSEEAITPWNFEEVVDKGASAQSFIERMTNFDEQLPNKKVLPKHSLLYEYFTVYNELTKVKYVTERMRKPEFLSGEQKKAIVDLLFKTNRKVTVKQLKEDYFKKIECLSYETEILTVEYGLLPIGKIVEKRIECTVYSVDNNGNIYTQPVAQWHDRGEQEVFEYCLEDGSLIRATKDHKFMTVDGQMLPIDEIFERELDLMRVDNLPNSGGSKRTADGSEFEPKKKRKV

SEQ ID NO: 354 - protein, 1700 aa, Artificial Sequence
  HMGN-dScCas-FokI
  misc_feature: synthetic
MAPKKKRKVPKRKVSSAEGAAKEEPKRRSARLSAKPPAKVEAKPKKAAAKDKSSDKKVQTKGKRGAKGKQAEVANQETKEDLPAENGETKTEESPASDEAGEKEAKSDGGSGSQLVKSELEEKKSELRHKLKYVPHEYIELIEIARNSTQDRILEMKVMEFFMKVYGYRGKHLGGSRKPDGAIYTVGSPIDYGVIVDTKAYSGGYNLPIGQADEMQRYVEENQTRNKHINPNEWWKVYPSSVTEFKFLFVSGHFKGNYKAQLTRLNHITNCNGAVLSVEELLIGGEMIKAGTLTLEEVRRKFNNGEINFSGSETPGTSESATPESMEKKYSIGLAIGTNSVGWAVITDDYKVPSKKFKVLGNTNRKSIKKNLMGALLFDSGETAEATRLKRTARRRYTRRKNRIRYLQEIFANEMAKLDDSFFQRLEESFLVEEDKKNERHPIFGNLADEVAYHRNYPTIYHLRKKLADSPEKADLRLIYLALAHIIKFRGHFLIEGKLNAENSDVAKLFYQLIQTYNQLFEESPLDEIEVDAKGILSARLSKSKRLEKLIAVFPNEKKNGLFGNIIALALGLTPNFKSNFDLTEDAKLQLSKDTYDDDLDELLGQIGDQYADLFSAAKNLSDAILLSDILRSNSEVTKAPLSASMVKRYDEHHQDLALLKTLVRQQFPEKYAEIFKDDTKNGYAGYVGIGIKHRKRTTKLATQEEFYKFIKPILEKMDGAEELLAKLNRDDLLRKQRTFDNGSIPHQIHLKELHAILRRQEEFYPFLKENREKIEKILTFRIPYYVGPLARGNSRFAWLTRKSEEAITPWNFEEVVDKGASAQSFIERMTNFDEQLPNKKVLPKHSLLYEYFTVYNELTKVKYVTERMRKPEFLSGEQKKAIVDLLFKTNRKVTVKQLKEDYFKKIECFDSVEIIGVEDRFNASLGTYHDLLKIIKDKDFLDNEENEDILEDIVLTLTLFEDREMIEERLKTYAHLFDDKVMKQLKRRHYTGWGRLSRKMINGIRDKQSGKTILDFLKSDGFSNRNFMQLIHDDSLTFKEEIEKAQVSGQGDSLHEQIADLAGSPAIKKGILQTVKIVDELVKVMGHKPENIVIEMARENQTTTKGLQQSRERKKRIEEGIKELESQILKENPVENTQLQNEKLYLYYLQNGRDMYVDQELDINRLSDYDVDAIVPQSFIKDDSIDNKVLTRSVENRGKSDNVPSEEVVKKMKNYWRQLLNAKLITQRKFDNLTKAERGGLSEADKAGFIKRQLVETRQITKHVARILDSRMNTKRDKNDKPIREVKVITLKSKLVSDFRKDFQLYKVRDINNYHHAHDAYLNAVVGTALIKKYPKLESEFVYGDYKVYDVRKMIAKSEQEIGKATAKRFFYSNIMNFFKTEVKLANGEIRKRPLIETNGETGEVVWNKEKDFATVRKVLAMPQVNIVKKTEVQTGGFSKESILSKRESAKLIPRKKGWDTRKYGGFGSPTVAYSILVVAKVEKGKAKKLKSVKVLVGITIMEKGSYEKDPIGFLEAKGYKDIKKELIFKLPKYSLFELENGRRRMLASATELQKANELVLPQHLVRLLYYTQNISATTGSNNLGYIEQHREEFKEIFEKIIDFSEKYILKNKVNSNLKSSFDEQFAVSDSILLSNSFVSLLKYTSFGASGGFTFLDLDVKQGRLRYQTVTEVLDATLIYQSITGLYETRTDLSQLGGD

SEQ ID NO: 355 - protein, 1783 aa, Artificial Sequence
  HMGN-dScCas-FokI-HMGB1
  misc_feature: synthetic
MAPKKKRKVPKRKVSSAEGAAKEEPKRRSARLSAKPPAKVEAKPKKAAAKDKSSDKKVQTKGKRGAKGKQAEVANQETKEDLPAENGETKTEESPASDEAGEKEAKSDGGSGSQLVKSELEEKKSELRHKLKYVPHEYIELIEIARNSTQDRILEMKVMEFFMKVYGYRGKHLGGSRKPDGAIYTVGSPIDYGVIVDTKAYSGGYNLPIGQADEMQRYVEENQTRNKHINPNEWWKVYPSSVTEFKFLFVSGHFKGNYKAQLTRLNHITNCNGAVLSVEELLIGGEMIKAGTLTLEEVRRKFNNGEINFSGSETPGTSESATPESMEKKYSIGLAIGTNSVGWAVITDDYKVPSKKFKVLGNTNRKSIKKNLMGALLFDSGETAEATRLKRTARRRYTRRKNRIRYLQEIFANEMAKLDDSFFQRLEESFLVEEDKKNERHPIFGNLADEVAYHRNYPTIYHLRKKLADSPEKADLRLIYLALAHIIKFRGHFLIEGKLNAENSDVAKLFYQLIQTYNQLFEESPLDEIEVDAKGILSARLSKSKRLEKLIAVFPNEKKNGLFGNIIALALGLTPNFKSNFDLTEDAKLQLSKDTYDDDLDELLGQIGDQYADLFSAAKNLSDAILLSDILRSNSEVTKAPLSASMVKRYDEHHQDLALLKTLVRQQFPEKYAEIFKDDTKNGYAGYVGIGIKHRKRTTKLATQEEFYKFIKPILEKMDGAEELLAKLNRDDLLRKQRTFDNGSIPHQIHLKELHAILRRQEEFYPFLKENREKIEKILTFRIPYYVGPLARGNSRFAWLTRKSEEAITPWNFEEVVDKGASAQSFIERMTNFDEQLPNKKVLPKHSLLYEYFTVYNELTKVKYVTERMRKPEFLSGEQKKAIVDLLFKTNRKVTVKQLKEDYFKKIECFDSVEIIGVEDRFNASLGTYHDLLKIIKDKDFLDNEENEDILEDIVLTLTLFEDREMIEERLKTYAHLFDDKVMKQLKRRHYTGWGRLSRKMINGIRDKQSGKTILDFLKSDGFSNRNFMQLIHDDSLTFKEEIEKAQVSGQGDSLHEQIADLAGSPAIKKGILQTVKIVDELVKVMGHKPENIVIEMARENQTTTKGLQQSRERKKRIEEGIKELESQILKENPVENTQLQNEKLYLYYLQNGRDMYVDQELDINRLSDYDVDAIVPQSFIKDDSIDNKVLTRSVENRGKSDNVPSEEVVKKMKNYWRQLLNAKLITQRKFDNLTKAERGGLSEADKAGFIKRQLVETRQITKHVARILDSRMNTKRDKNDKPIREVKVITLKSKLVSDFRKDFQLYKVRDINNYHHAHDAYLNAVVGTALIKKYPKLESEFVYGDYKVYDVRKMIAKSEQEIGKATAKRFFYSNIMNFFKTEVKLANGEIRKRPLIETNGETGEVVWNKEKDFATVRKVLAMPQVNIVKKTEVQTGGFSKESILSKRESAKLIPRKKGWDTRKYGGFGSPTVAYSILVVAKVEKGKAKKLKSVKVLVGITIMEKGSYEKDPIGFLEAKGYKDIKKELIFKLPKYSLFELENGRRRMLASATELQKANELVLPQHLVRLLYYTQNISATTGSNNLGYIEQHREEFKEIFEKIIDFSEKYILKNKVNSNLKSSFDEQFAVSDSILLSNSFVSLLKYTSFGASGGFTFLDLDVKQGRLRYQTVTEVLDATLIYQSITGLYETRTDLSQLGGDGKGDPKKPRGKMSSYAFFVQTCREEHKKKHPDASVNFSEFSKKCSERWKTMSAKEKGKFEDMAKADKARYEREMKTYIPPKGE

SEQ ID NO: 356 - protein, 1786 aa, Artificial Sequence
  HMGN-dScCas-FokI-HMGB3
  misc_feature: synthetic
MAPKKKRKVPKRKVSSAEGAAKEEPKRRSARLSAKPPAKVEAKPKKAAAKDKSSDKKVQTKGKRGAKGKQAEVANQETKEDLPAENGETKTEESPASDEAGEKEAKSDGGSGSQLVKSELEEKKSELRHKLKYVPHEYIELIEIARNSTQDRILEMKVMEFFMKVYGYRGKHLGGSRKPDGAIYTVGSPIDYGVIVDTKAYSGGYNLPIGQADEMQRYVEENQTRNKHINPNEWWKVYPSSVTEFKFLFVSGHFKGNYKAQLTRLNHITNCNGAVLSVEELLIGGEMIKAGTLTLEEVRRKFNNGEINFSGSETPGTSESATPESMEKKYSIGLAIGTNSVGWAVITDDYKVPSKKFKVLGNTNRKSIKKNLMGALLFDSGETAEATRLKRTARRRYTRRKNRIRYLQEIFANEMAKLDDSFFQRLEESFLVEEDKKNERHPIFGNLADEVAYHRNYPTIYHLRKKLADSPEKADLRLIYLALAHIIKFRGHFLIEGKLNAENSDVAKLFYQLIQTYNQLFEESPLDEIEVDAKGILSARLSKSKRLEKLIAVFPNEKKNGLFGNIIALALGLTPNFKSNFDLTEDAKLQLSKDTYDDDLDELLGQIGDQYADLFSAAKNLSDAILLSDILRSNSEVTKAPLSASMVKRYDEHHQDLALLKTLVRQQFPEKYAEIFKDDTKNGYAGYVGIGIKHRKRTTKLATQEEFYKFIKPILEKMDGAEELLAKLNRDDLLRKQRTFDNGSIPHQIHLKELHAILRRQEEFYPFLKENREKIEKILTFRIPYYVGPLARGNSRFAWLTRKSEEAITPWNFEEVVDKGASAQSFIERMTNFDEQLPNKKVLPKHSLLYEYFTVYNELTKVKYVTERMRKPEFLSGEQKKAIVDLLFKTNRKVTVKQLKEDYFKKIECFDSVEIIGVEDRFNASLGTYHDLLKIIKDKDFLDNEENEDILEDIVLTLTLFEDREMIEERLKTYAHLFDDKVMKQLKRRHYTGWGRLSRKMINGIRDKQSGKTILDFLKSDGFSNRNFMQLIHDDSLTFKEEIEKAQVSGQGDSLHEQIADLAGSPAIKKGILQTVKIVDELVKVMGHKPENIVIEMARENQTTTKGLQQSRERKKRIEEGIKELESQILKENPVENTQLQNEKLYLYYLQNGRDMYVDQELDINRLSDYDVDAIVPQSFIKDDSIDNKVLTRSVENRGKSDNVPSEEVVKKMKNYWRQLLNAKLITQRKFDNLTKAERGGLSEADKAGFIKRQLVETRQITKHVARILDSRMNTKRDKNDKPIREVKVITLKSKLVSDFRKDFQLYKVRDINNYHHAHDAYLNAVVGTALIKKYPKLESEFVYGDYKVYDVRKMIAKSEQEIGKATAKRFFYSNIMNFFKTEVKLANGEIRKRPLIETNGETGEVVWNKEKDFATVRKVLAMPQVNIVKKTEVQTGGFSKESILSKRESAKLIPRKKGWDTRKYGGFGSPTVAYSILVVAKVEKGKAKKLKSVKVLVGITIMEKGSYEKDPIGFLEAKGYKDIKKELIFKLPKYSLFELENGRRRMLASATELQKANELVLPQHLVRLLYYTQNISATTGSNNLGYIEQHREEFKEIFEKIIDFSEKYILKNKVNSNLKSSFDEQFAVSDSILLSNSFVSLLKYTSFGASGGFTFLDLDVKQGRLRYQTVTEVLDATLIYQSITGLYETRTDLSQLGGDGSSGSSGMAKGDPKKPKGKMSAYAFFVQTCREEHKKKNPEVPVNFAEFSKKCSERWKTMSGKEKSKFDEMAKADKVRYDREMKDYG

SEQ ID NO: 357 - protein, 1782 aa, Artificial Sequence
  HMGN-dScCas-FokI-HMGB4
  misc_feature: synthetic
MAPKKKRKVPKRKVSSAEGAAKEEPKRRSARLSAKPPAKVEAKPKKAAAKDKSSDKKVQTKGKRGAKGKQAEVANQETKEDLPAENGETKTEESPASDEAGEKEAKSDGGSGSQLVKSELEEKKSELRHKLKYVPHEYIELIEIARNSTQDRILEMKVMEFFMKVYGYRGKHLGGSRKPDGAIYTVGSPIDYGVIVDTKAYSGGYNLPIGQADEMQRYVEENQTRNKHINPNEWWKVYPSSVTEFKFLFVSGHFKGNYKAQLTRLNHITNCNGAVLSVEELLIGGEMIKAGTLTLEEVRRKFNNGEINFSGSETPGTSESATPESMEKKYSIGLAIGTNSVGWAVITDDYKVPSKKFKVLGNTNRKSIKKNLMGALLFDSGETAEATRLKRTARRRYTRRKNRIRYLQEIFANEMAKLDDSFFQRLEESFLVEEDKKNERHPIFGNLADEVAYHRNYPTIYHLRKKLADSPEKADLRLIYLALAHIIKFRGHFLIEGKLNAENSDVAKLFYQLIQTYNQLFEESPLDEIEVDAKGILSARLSKSKRLEKLIAVFPNEKKNGLFGNIIALALGLTPNFKSNFDLTEDAKLQLSKDTYDDDLDELLGQIGDQYADLFSAAKNLSDAILLSDILRSNSEVTKAPLSASMVKRYDEHHQDLALLKTLVRQQFPEKYAEIFKDDTKNGYAGYVGIGIKHRKRTTKLATQEEFYKFIKPILEKMDGAEELLAKLNRDDLLRKQRTFDNGSIPHQIHLKELHAILRRQEEFYPFLKENREKIEKILTFRIPYYVGPLARGNSRFAWLTRKSEEAITPWNFEEVVDKGASAQSFIERMTNFDEQLPNKKVLPKHSLLYEYFTVYNELTKVKYVTERMRKPEFLSGEQKKAIVDLLFKTNRKVTVKQLKEDYFKKIECFDSVEIIGVEDRFNASLGTYHDLLKIIKDKDFLDNEENEDILEDIVLTLTLFEDREMIEERLKTYAHLFDDKVMKQLKRRHYTGWGRLSRKMINGIRDKQSGKTILDFLKSDGFSNRNFMQLIHDDSLTFKEEIEKAQVSGQGDSLHEQIADLAGSPAIKKGILQTVKIVDELVKVMGHKPENIVIEMARENQTTTKGLQQSRERKKRIEEGIKELESQILKENPVENTQLQNEKLYLYYLQNGRDMYVDQELDINRLSDYDVDAIVPQSFIKDDSIDNKVLTRSVENRGKSDNVPSEEVVKKMKNYWRQLLNAKLITQRKFDNLTKAERGGLSEADKAGFIKRQLVETRQITKHVARILDSRMNTKRDKNDKPIREVKVITLKSKLVSDFRKDFQLYKVRDINNYHHAHDAYLNAVVGTALIKKYPKLESEFVYGDYKVYDVRKMIAKSEQEIGKATAKRFFYSNIMNFFKTEVKLANGEIRKRPLIETNGETGEVVWNKEKDFATVRKVLAMPQVNIVKKTEVQTGGFSKESILSKRESAKLIPRKKGWDTRKYGGFGSPTVAYSILVVAKVEKGKAKKLKSVKVLVGITIMEKGSYEKDPIGFLEAKGYKDIKKELIFKLPKYSLFELENGRRRMLASATELQKANELVLPQHLVRLLYYTQNISATTGSNNLGYIEQHREEFKEIFEKIIDFSEKYILKNKVNSNLKSSFDEQFAVSDSILLSNSFVSLLKYTSFGASGGFTFLDLDVKQGRLRYQTVTEVLDATLIYQSITGLYETRTDLSQLGGDGGSGGKEIQLKPKANVSSYVHFLLNYRNKFKEQQPNTYVGFKEFSRKCSEKWRSISKHEKAKYEALAKLDKARYQEEMMNYV

SEQ ID NO: 358 - protein, 707 aa, Artificial Sequence
  synthetic
  MISC_FEATURE: CasF-1
  misc_feature: Biggiephage clade
MADTPTLFTQFLRHHLPGQRFRKDILKQAGRILANKGEDATIAFLRGKSEESPPDFQPPVKCPIIACSRPLTEWPIYQASVAIQGYVYGQSLAEFEASDPGCSKDGLLGWFDKTGVCTDYFSVQGLNLIFQNARKRYIGVQTKVTNRNEKRHKKLKRINAKRIAEGLPELTSDEPESALDETGHLIDPPGLNTNIYCYQQVSPKPLALSEVNQLPTAYAGYSTSGDDPIQPMVTKDRLSISKGQPGYIPEHQRALLSQKKHRRMRGYGLKARALLVIVRIQDDWAVIDLRSLLRNAYWRRIVQTKEPSTITKLLKLVTGDPVLDATRMVATFTYKPGIVQVRSAKCLKNKQGSKLFSERYLNETVSVTSIDLGSNNLVAVATYRLVNGNTPELLQRFTLPSHLVKDFERYKQAHDTLEDSIQKTAVASLPQGQQTEIRMWSMYGFREAQERVCQELGLADGSIPWNVMTATSTILTDLFLARGGDPKKCMFTSEPKKKKNSKQVLYKIRDRAWAKMYRTLLSKETREAWNKALWGLKRGSPDYARLSKRKEELARRCVNYTISTAEKRAQCGRTIVALEDLNIGFFHGRGKQEPGWVGLFTRKKENRWLMQALHKAFLELAHHRGYHVIEVNPAYTSQTCPVCRHCDPDNRDQHNREAFHCIGCGFRGNADLDVATHNIAMVAITGESLKRARGSVASKTPQPLAAE

SEQ ID NO: 359 - protein, 757 aa, Artificial Sequence
  synthetic
  MISC_FEATURE: CasF-2
  misc_feature: Biggiephage clade
MPKPAVESEFSKVLKKHFPGERFRSSYMKRGGKILAAQGEEAVVAYLQGKSEEEPPNFQPPAKCHVVTKSRDFAEWPIMKASEAIQRYIYALSTTERAACKPGKSSESHAAWFAATGVSNHGYSHVQGLNLIFDHTLGRYDGVLKKVQLRNEKARARLESINASRADEGLPEIKAEEEEVATNETGHLLQPPGINPSFYVYQTISPQAYRPRDEIVLPPEYAGYVRDPNAPIPLGVVRNRCDIQKGCPGYIPEWQREAGTAISPKTGKAVTVPGLSPKKNKRMRRYWRSEKEKAQDALLVTVRIGTDWVVIDVRGLLRNARWRTIAPKDISLNALLDLFTGDPVIDVRRNIVTFTYTLDACGTYARKWTLKGKQTKATLDKLTATQTVALVAIDLGQTNPISAGISRVTQENGALQCEPLDRFTLPDDLLKDISAYRIAWDRNEEELRARSVEALPEAQQAEVRALDGVSKETARTQLCADFGLDPKRLPWDKMSSNTTFISEALLSNSVSRDQVFFTPAPKKGAKKKAPVEVMRKDRTWARAYKPRLSVEAQKLKNEALWALKRTSPEYLKLSRRKEELCRRSINYVIEKTRRRTQCQIVIPVIEDLNVRFFHGSGKRLPGWDNFFTAKKENRWFIQGLHKAFSDLRTHRSFYVFEVRPERTSITCPKCGHCEVGNRDGEAFQCLSCGKTCNADLDVATHNLTQVALTGKTMPKREEPRDAQGTAPARKTKKASKSKAPPAEREDQTPAQEPSQTS

SEQ ID NO: 360 - protein, 766 aa, Artificial Sequence
  synthetic
  MISC_FEATURE: CasF-3
  misc_feature: Biggiephage clade
MEKEITELTKIRREFPNKKFSSTDMKKAGKLLKAEGPDAVRDFLNSCQEIIGDFKPPVKTNIVSISRPFEEWPVSMVGRAIQEYYFSLTKEELESVHPGTSSEDHKSFFNITGLSNYNYTSVQGLNLIFKNAKAIYDGTLVKANNKNKKLEKKFNEINHKRSLEGLPIITPDFEEPFDENGHLNNPPGINRNIYGYQGCAAKVFVPSKHKMVSLPKEYEGYNRDPNLSLAGFRNRLEIPEGEPGHVPWFQRMDIPEGQIGHVNKIQRFNFVHGKNSGKVKFSDKTGRVKRYHHSKYKDATKPYKFLEESKKVSALDSILAIITIGDDWVVFDIRGLYRNVFYRELAQKGLTAVQLLDLFTGDPVIDPKKGVVTFSYKEGVVPVFSQKIVPRFKSRDTLEKLTSQGPVALLSVDLGQNEPVAARVCSLKNINDKITLDNSCRISFLDDYKKQIKDYRDSLDELEIKIRLEAINSLETNQQVEIRDLDVFSADRAKANTVDMFDIDPNLISWDSMSDARVSTQISDLYLKNGGDESRVYFEINNKRIKRSDYNISQLVRPKLSDSTRKNLNDSIWKLKRTSEEYLKLSKRKLELSRAVVNYTIRQSKLLSGINDIVIILEDLDVKKKFNGRGIRDIGWDNFFSSRKENRWFIPAFHKAFSELSSNRGLCVIEVNPAWTSATCPDCGFCSKENRDGINFTCRKCGVSYHADIDVATLNIARVAVLGKPMSGPADRERLGDTKKPRVARSRKTMKRKDISNSTVEAMVTA

SEQ ID NO: 361 - protein, 757 aa, Artificial Sequence
  dCasF-2 (nuclease deficient CasF-2)
MPKPAVESEFSKVLKKHFPGERFRSSYMKRGGKILAAQGEEAVVAYLQGKSEEEPPNFQPPAKCHVVTKSRDFAEWPIMKASEAIQRYIYALSTTERAACKPGKSSESHAAWFAATGVSNHGYSHVQGLNLIFDHTLGRYDGVLKKVQLRNEKARARLESINASRADEGLPEIKAEEEEVATNETGHLLQPPGINPSFYVYQTISPQAYRPRDEIVLPPEYAGYVRDPNAPIPLGVVRNRCDIQKGCPGYIPEWQREAGTAISPKTGKAVTVPGLSPKKNKRMRRYWRSEKEKAQDALLVTVRIGTDWVVIDVRGLLRNARWRTIAPKDISLNALLDLFTGDPVIDVRRNIVTFTYTLDACGTYARKWTLKGKQTKATLDKLTATQTVALVAIALGQTNPISAGISRVTQENGALQCEPLDRFTLPDDLLKDISAYRIAWDRNEEELRARSVEALPEAQQAEVRALDGVSKETARTQLCADFGLDPKRLPWDKMSSNTTFISEALLSNSVSRDQVFFTPAPKKGAKKKAPVEVMRKDRTWARAYKPRLSVEAQKLKNEALWALKRTSPEYLKLSRRKEELCRRSINYVIEKTRRRTQCQIVIPVIEDLNVRFFHGSGKRLPGWDNFFTAKKENRWFIQGLHKAFSDLRTHRSFYVFEVRPERTSITCPKCGHCEVGNRDGEAFQCLSCGKTCNADLDVATHNLTQVALTGKTMPKREEPRDAQGTAPARKTKKASKSKAPPAEREDQTPAQEPSQTS

SEQ ID NO: 362 - protein, 757 aa, Artificial Sequence; identical to SEQ ID NO: 361
  dCasF-2 RuvCdel1
  misc_feature: synthetic

SEQ ID NO: 363 - protein, 983 aa, Artificial Sequence
  dCasF2-Fok (N-terminal Fok)
  misc_feature: synthetic
MAPKKKRKVGGSGSQLVKSELEEKKSELRHKLKYVPHEYIELIEIARNSTQDRILEMKVMEFFMKVYGYRGKHLGGSRKPDGAIYTVGSPIDYGVIVDTKAYSGGYNLPIGQADEMQRYVEENQTRNKHINPNEWWKVYPSSVTEFKFLFVSGHFKGNYKAQLTRLNHITNCNGAVLSVEELLIGGEMIKAGTLTLEEVRRKFNNGEINFSGSETPGTSESATPESMPKPAVESEFSKVLKKHFPGERFRSSYMKRGGKILAAQGEEAVVAYLQGKSEEEPPNFQPPAKCHVVTKSRDFAEWPIMKASEAIQRYIYALSTTERAACKPGKSSESHAAWFAATGVSNHGYSHVQGLNLIFDHTLGRYDGVLKKVQLRNEKARARLESINASRADEGLPEIKAEEEEVATNETGHLLQPPGINPSFYVYQTISPQAYRPRDEIVLPPEYAGYVRDPNAPIPLGVVRNRCDIQKGCPGYIPEWQREAGTAISPKTGKAVTVPGLSPKKNKRMRRYWRSEKEKAQDALLVTVRIGTDWVVIDVRGLLRNARWRTIAPKDISLNALLDLFTGDPVIDVRRNIVTFTYTLDACGTYARKWTLKGKQTKATLDKLTATQTVALVAIALGQTNPISAGISRVTQENGALQCEPLDRFTLPDDLLKDISAYRIAWDRNEEELRARSVEALPEAQQAEVRALDGVSKETARTQLCADFGLDPKRLPWDKMSSNTTFISEALLSNSVSRDQVFFTPAPKKGAKKKAPVEVMRKDRTWARAYKPRLSVEAQKLKNEALWALKRTSPEYLKLSRRKEELCRRSINYVIEKTRRRTQCQIVIPVIEDLNVRFFHGSGKRLPGWDNFFTAKKENRWFIQGLHKAFSDLRTHRSFYVFEVRPERTSITCPKCGHCEVGNRDGEAFQCLSCGKTCNADLDVATHNLTQVALTGKTMPKREEPRDAQGTAPARKTKKASKSKAPPAEREDQTPAQEPSQTS

SEQ ID NO: 364 - protein, 975 aa, Artificial Sequence
  dCasF2-Fok RuvC del 2
  misc_feature: synthetic
MAPKKKRKVGGSGSQLVKSELEEKKSELRHKLKYVPHEYIELIEIARNSTQDRILEMKVMEFFMKVYGYRGKHLGGSRKPDGAIYTVGSPIDYGVIVDTKAYSGGYNLPIGQADEMQRYVEENQTRNKHINPNEWWKVYPSSVTEFKFLFVSGHFKGNYKAQLTRLNHITNCNGAVLSVEELLIGGEMIKAGTLTLEEVRRKFNNGEINFSGSETPGTSESATPESMPKPAVESEFSKVLKKHFPGERFRSSYMKRGGKILAAQGEEAVVAYLQGKSEEEPPNFQPPAKCHVVTKSRDFAEWPIMKASEAIQRYIYALSTTERAACKPGKSSESHAAWFAATGVSNHGYSHVQGLNLIFDHTLGRYDGVLKKVQLRNEKARARLESINASRADEGLPEIKAEEEEVATNETGHLLQPPGINPSFYVYQTISPQAYRPRDEIVLPPEYAGYVRDPNAPIPLGVVRNRCDIQKGCPGYIPEWQREAGTAISPKTGKAVTVPGLSPKKNKRMRRYWRSEKEKAQDALLVTVRIGTDWVVIDVRGLLRNARWRTIAPKDISLNALLDLFTGDPVIDVRRNIVTFTYTLDACGTYARKWTLKGKQTKATLDKLTATQTVALVAIALGQTNPISAGISRVTQENGALQCEPLDRFTLPDDLLKDISAYRIAWDRNEEELRARSVEALPEAQQAEVRALDGVSKETARTQLCADFGLDPKRLPWDKMSSNTTFISEALLSNSVSRDQVFFTPAPKKGAKKKAPVEVMRKDRTWARAYKPRLSVEAQKLKNEALWALKRTSPEYLKLSRRKEELCRRSINYVIEKTRRRTQCQIGGSGFHGSGKRLPGWDNFFTAKKENRWFIQGLHKAFSDLRTHRSFYVFEVRPERTSITCPKCGHCEVGNRDGEAFQCLSCGKTCNADLDVATHNLTQVALTGKTMPKREEPRDAQGTAPARKTKKASKSKAPPAEREDQTPAQEPSQTS

SEQ ID NO: 365 - protein, 969 aa, Artificial Sequence
  dCasF2-Fok RuvC del 3
  misc_feature: synthetic
MAPKKKRKVGGSGSQLVKSELEEKKSELRHKLKYVPHEYIELIEIARNSTQDRILEMKVMEFFMKVYGYRGKHLGGSRKPDGAIYTVGSPIDYGVIVDTKAYSGGYNLPIGQADEMQRYVEENQTRNKHINPNEWWKVYPSSVTEFKFLFVSGHFKGNYKAQLTRLNHITNCNGAVLSVEELLIGGEMIKAGTLTLEEVRRKFNNGEINFSGSETPGTSESATPESMPKPAVESEFSKVLKKHFPGERFRSSYMKRGGKILAAQGEEAVVAYLQGKSEEEPPNFQPPAKCHVVTKSRDFAEWPIMKASEAIQRYIYALSTTERAACKPGKSSESHAAWFAATGVSNHGYSHVQGLNLIFDHTLGRYDGVLKKVQLRNEKARARLESINASRADEGLPEIKAEEEEVATNETGHLLQPPGINPSFYVYQTISPQAYRPRDEIVLPPEYAGYVRDPNAPIPLGVVRNRCDIQKGCPGYIPEWQREAGTAISPKTGKAVTVPGLSPKKNKRMRRYWRSEKEKAQDALLVTVRIGTDWVVIDVRGLLRNARWRTIAPKDISLNALLDLFTGDPVIDVRRNIVTFTYTLDACGTYARKWTLKGKQTKATLDKLTATQTVALVAIALGQTNPISAGISRVTQENGALQCEPLDRFTLPDDLLKDISAYRIAWDRNEEELRARSVEALPEAQQAEVRALDGVSKETARTQLCADFGLDPKRLPWDKMSSNTTFISEALLSNSVSRDQVFFTPAPKKGAKKKAPVEVMRKDRTWARAYKPRLSVEAQKLKNEALWALKRTSPEYLKLSRRKEELCRRSINYVIEKTRRRTQCQIVIPVIEDLNVRFFHGSGKRLPGWDNFFTAKKENRWFIQGLHKAFSDLRTHRSFYVFEVRPERTSITCPKCGHCEVGNRDGEAFQCLSCGGSGALTGKTMPKREEPRDAQGTAPARKTKKASKSKAPPAEREDQTPAQEPSQTS

SEQ ID NO: 366 - protein, 978 aa, Artificial Sequence
  dCasF2-Fok (C-terminal Fok)
  misc_feature: synthetic
MAPKKKRKVGGSGPKPAVESEFSKVLKKHFPGERFRSSYMKRGGKILAAQGEEAVVAYLQGKSEEEPPNFQPPAKCHVVTKSRDFAEWPIMKASEAIQRYIYALSTTERAACKPGKSSESHAAWFAATGVSNHGYSHVQGLNLIFDHTLGRYDGVLKKVQLRNEKARARLESINASRADEGLPEIKAEEEEVATNETGHLLQPPGINPSFYVYQTISPQAYRPRDEIVLPPEYAGYVRDPNAPIPLGVVRNRCDIQKGCPGYIPEWQREAGTAISPKTGKAVTVPGLSPKKNKRMRRYWRSEKEKAQDALLVTVRIGTDWVVIDVRGLLRNARWRTIAPKDISLNALLDLFTGDPVIDVRRNIVTFTYTLDACGTYARKWTLKGKQTKATLDKLTATQTVALVAIALGQTNPISAGISRVTQENGALQCEPLDRFTLPDDLLKDISAYRIAWDRNEEELRARSVEALPEAQQAEVRALDGVSKETARTQLCADFGLDPKRLPWDKMSSNTTFISEALLSNSVSRDQVFFTPAPKKGAKKKAPVEVMRKDRTWARAYKPRLSVEAQKLKNEALWALKRTSPEYLKLSRRKEELCRRSINYVIEKTRRRTQCQIVIPVIEDLNVRFFHGSGKRLPGWDNFFTAKKENRWFIQGLHKAFSDLRTHRSFYVFEVRPERTSITCPKCGHCEVGNRDGEAFQCLSCGKTCNADLDVATHNLTQVALTGKTMPKREEPRDAQGTAPARKTKKASKSKAPPAEREDQTPAQEPSQTSSGSETPGTSESATPEVKSELEEKKSELRHKLKYVPHEYIELIEIARNSTQDRILEMKVMEFFMKVYGYRGKHLGGSRKPDGAIYTVGSPIDYGVIVDTKAYSGGYNLPIGQADEMQRYVEENQTRNKHINPNEWWKVYPSSVTEFKFLFVSGHFKGNYKAQLTRLNHITNCNGAVLSVEELLIGGEMIKAGTLTLEEVRRKFNNGEINF

SEQ ID NO: 367 - DNA, 593 bp, Artificial Sequence
  PD1.dcasffok.pamout.1
  misc_feature: synthetic
acgcgtaaaaaaaaagtcaccacgagcagggctgggtcccctcgtgaggggcaatcgttgggtgtttcgtggtctcatacagaacttataagattcccaaatccaaagacatttcacgtttatggtgatttcccagaacacatagcgacatgcaaatattgcagggcgccactcccctgtccctcacagccatcttcctgccagggcgcacgcgcgctgggtgttcccgcctagtgacactgggcccgcgattccttggagcgggttgatgacgtcagcgttcaaagagggcctatttcccatgattccttcatatttgcatatacgatacaaggctgttagagagataattggaattaatttgactgtaaacacaaagatattagtacaaaatacgtgacgtagaaagtaataatttcttgggtagtttgcagttttaaaattatgttttaaaatggactatcatatgcttaccgtaacttgaaagtatttcgatttcttggctttatatatcttgtggaaaggacgaaacacccaacgattgcccctcacgaggggacagaagctgcaggtgaaggtgtttttttacgcgt

SEQ ID NO: 368 - DNA, 593 bp, Artificial Sequence
  PD1.dcasffok.pamout.2
  misc_feature: synthetic
acgcgtaaaaaaaaagtccccttcggtcaccacgagtcccctcgtgaggggcaatcgttgggtgtttcgtggtctcatacagaacttataagattcccaaatccaaagacatttcacgtttatggtgatttcccagaacacatagcgacatgcaaatattgcagggcgccactcccctgtccctcacagccatcttcctgccagggcgcacgcgcgctgggtgttcccgcctagtgacactgggcccgcgattccttggagcgggttgatgacgtcagcgttcaaagagggcctatttcccatgattccttcatatttgcatatacgatacaaggctgttagagagataattggaattaatttgactgtaaacacaaagatattagtacaaaatacgtgacgtagaaagtaataatttcttgggtagtttgcagttttaaaattatgttttaaaatggactatcatatgcttaccgtaacttgaaagtatttcgatttcttggctttatatatcttgtggaaaggacgaaacacccaacgattgcccctcacgaggggacgatgtgttggagaagctgcatttttttacgcgt

SEQ ID NO: 369 - DNA, 593 bp, Artificial Sequence
  PD1.dcasffok.pamout.3
  misc_feature: synthetic
acgcgtaaaaaaaaactggtaccgcatgagccccagtcccctcgtgaggggcaatcgttgggtgtttcgtggtctcatacagaacttataagattcccaaatccaaagacatttcacgtttatggtgatttcccagaacacatagcgacatgcaaatattgcagggcgccactcccctgtccctcacagccatcttcctgccagggcgcacgcgcgctgggtgttcccgcctagtgacactgggcccgcgattccttggagcgggttgatgacgtcagcgttcaaagagggcctatttcccatgattccttcatatttgcatatacgatacaaggctgttagagagataattggaattaatttgactgtaaacacaaagatattagtacaaaatacgtgacgtagaaagtaataatttcttgggtagtttgcagttttaaaattatgttttaaaatggactatcatatgcttaccgtaacttgaaagtatttcgatttcttggctttatatatcttgtggaaaggacgaaacacccaacgattgcccctcacgaggggacagcttctccaacacatcggatttttttacgcgt

SEQ ID NO: 370 - DNA, 593 bp, Artificial Sequence
  PD1.dcasffok.pamin.1
  misc_feature: synthetic
acgcgtaaaaaaaaactccccagccctgctcgtgggtcccctcgtgaggggcaatcgttgggtgtttcgtggtctcatacagaacttataagattcccaaatccaaagacatttcacgtttatggtgatttcccagaacacatagcgacatgcaaatattgcagggcgccactcccctgtccctcacagccatcttcctgccagggcgcacgcgcgctgggtgttcccgcctagtgacactgggcccgcgattccttggagcgggttgatgacgtcagcgttcaaagagggcctatttcccatgattccttcatatttgcatatacgatacaaggctgttagagagataattggaattaatttgactgtaaacacaaagatattagtacaaaatacgtgacgtagaaagtaataatttcttgggtagtttgcagttttaaaattatgttttaaaatggactatcatatgcttaccgtaacttgaaagtatttcgatttcttggctttatatatcttgtggaaaggacgaaacacccaacgattgcccctcacgaggggacacctgcagcttctccaacactttttttacgcgt

SEQ ID NO: 371 - DNA, 593 bp, Artificial Sequence
  PD1.dcasffok.pamin.2
  misc_feature: synthetic
acgcgtaaaaaaaaaccccttcggtcaccacgagcgtcccctcgtgaggggcaatcgttgggtgtttcgtggtctcatacagaacttataagattcccaaatccaaagacatttcacgtttatggtgatttcccagaacacatagcgacatgcaaatattgcagggcgccactcccctgtccctcacagccatcttcctgccagggcgcacgcgcgctgggtgttcccgcctagtgacactgggcccgcgattccttggagcgggttgatgacgtcagcgttcaaagagggcctatttcccatgattccttcatatttgcatatacgatacaaggctgttagagagataattggaattaatttgactgtaaacacaaagatattagtacaaaatacgtgacgtagaaagtaataatttcttgggtagtttgcagttttaaaattatgttttaaaatggactatcatatgcttaccgtaacttgaaagtatttcgatttcttggctttatatatcttgtggaaaggacgaaacacccaacgattgcccctcacgaggggactccaacacatcggagagctttttttttacgcgt

SEQ ID NO: 372 - DNA, 593 bp, Artificial Sequence
  PD1.dcasffok.pamin.3
  misc_feature: synthetic
acgcgtaaaaaaaaagggctggctgcggtcctcgggtcccctcgtgaggggcaatcgttgggtgtttcgtggtctcatacagaacttataagattcccaaatccaaagacatttcacgtttatggtgatttcccagaacacatagcgacatgcaaatattgcagggcgccactcccctgtccctcacagccatcttcctgccagggcgcacgcgcgctgggtgttcccgcctagtgacactgggcccgcgattccttggagcgggttgatgacgtcagcgttcaaagagggcctatttcccatgattccttcatatttgcatatacgatacaaggctgttagagagataattggaattaatttgactgtaaacacaaagatattagtacaaaatacgtgacgtagaaagtaataatttcttgggtagtttgcagttttaaaattatgttttaaaatggactatcatatgcttaccgtaacttgaaagtatttcgatttcttggctttatatatcttgtggaaaggacgaaacacccaacgattgcccctcacgaggggacttgctggggctcatgcggtatttttttacgcgt

SEQ ID NO: 373 - DNA, 11080 bp, Homo sapiens
  misc_feature: human MPO gene Accession Number: NC_000017.11>NC_000017.11:c58280935-58269856 Homo sapiens chromosome 17, GRCh38.p12 Primary Assembly
gacaatatcaggtgagctgtggaggtggggtccttggaagctggatgacagcagctggcaaggggataagagagcagtgagcccctccctcaaggaggtctggctttatccatagacagggccctctgaggtggggctgaggtacaaagggggattgagcagcccaggagaagagagatgggggttcccttcttctcttctctcagatgcatggtggacttaggaccttgctgggctgggggtctcactgcagagatgaagctgcttctggccctagcagggctcctggccattctggccacgccccagccctctgaaggtgctgctccaggtaacagttcccaaggtgggagaagatggtgtgttggggtggttgtgttccagagaccccttttctcagagcaggccttcctagctctggggcctgatagggggttggggcccattcctgactttgtgatccctgctctgggcagctgtcctgggggaggtggacacctcgttggtgctgagctccatggaggaggccaagcagctggtggacaaggcctacaaggagcggcgggaaaggtggggcacgaggcactgcccagctctgggcaaggatgtcccaggcctttcagagaagcagcaggcagcagggagcttgaaggtgggagagggggactatggggacccatgtggactccctttctgtctgtctgtccctgtgtttctggatgggagaacagcttaaaagccatccttcccaaagccttgcctctgtctggacacccaggtccatatcctttttataaaaggaagccttcctcccacccgtgggcctgcctgcatggtcctgcatgtctgcccctgggctggggctctgctgggtgggtctgtatcccttctctggccctcactcctcctttctccaagcagcatcaagcagcggcttcgcagcggctcagccagccccatggaactcctatcctacttcaagcagccggtggcagccaccaggacggcggtgagggccgctgactacctgcacgtggctctagacctgctggagaggaagctgcggtccctgtggcgaaggccattcaatgtcactggtactgttgcccatcacaccccaggtccctgctccactagtgactcctcctagggaccccagccgtctctcagtgatcccctcaacttcttcctccagggagtctcaggagtctccagggctcctcagcctcaggttgcctgggataggaagtgaggcggctcagctcccccattgttctttcccccggcagatgtgctgacgcccgcccagctgaatgtgttgtccaagtcaagcggctgcgcctaccaggacgtgggggtgacttgcccggagcaggacaaataccgcaccatcaccgggatgtgcaacaacaggtgcggctggctgggggtggctgcaggaaccgggctcagagaggcgtcccggacgccacaagcctcccggtgtcagcgccctgtcctcccctgcagacgcagccccacgctgggggcctccaaccgtgcctttgtgcgctggctgccggcggagtatgaggacggcttctctcttccctacggctggacgcccggggtcaagcgcaacggcttcccggtggctctggtgagcgccggcgggcagagggggcgaggcccggccacgcggtgcgcggacccaggcgccagctgatctccgtgtcccgcaggctcgcgcggtctccaacgagatcgtgcgcttccccactgatcagctgactccggaccaggagcgctcactcatgttcatgcaatggggccagctgttggaccacgacctcgacttcacccctgagccggccgcccgggcctccttcgtcactggcgtcaactgcgagaccagctgcgttcagcagccgccctgcttcccgctcaaggtggccctgcttcccgcccactgcctgggttgggagaggggagattgtttctggaaggggccatctcccttctgtgcccaggtttcctttcccagacgctgaggaaggctggccctgcctcccttgtgtccacagcactggctgctcagctatgacctgtctccttcctgcgcctgggctcagccagctggcagccagggccgtccatttgctcactgcctctggcaggccaagggagagagggttgttcctccttggctgacaggagtcctgttggtggaatcactggctctttgttaggttgggagagggttctgggaggagaccttctcagtgccccccaagcctccatgctcagtcctgtttccgccccactgagagggcagccccaacccccatcacacagaaagagagagcctgggggtctggtgggtgccgtgggacagggctgggagtgggcagggtggtcgaggcactgctgagtagggaaggaggaggagagaaaggagagagcgcctgagagagggagagacagacaggagaatgtcagggccagagggagagcaggcacagcagagagaaggggagagagacgggcgacgctttagtgaggagggatccgaggcctggcggtgcccagacccaggggttgcccaggttcccagttcagtgttctgctcattaaccctgcacctcagaggctgttgctgatggcgccctaggcagcgatccctttcgggcctccggaggcctctctgcaggttgagggtaccagaggtcctgagggcagggggagatccagttctgcctgggcaccttccttgccctcggtgagccagtctagcctctctctgtgcctcagatcccgcccaatgacccccgcatcaagaaccaagccgactgcatcccgttcttccgctcctgcccggcttgccccgggagcaacatcaccatccgcaaccagatcaacgcgctcacttccttcgtggacgccagcatggtgtacggcagcgaggagcccctggccaggaacctgcgcaacatgtccaaccagctggggctgctggccgtcaaccagcgcttccaagacaacggccgggccctgctgccctttgacaacctgcacgatgacccctgtctcctcaccaaccgctcagcgcgcatcccctgcttcctggcaggtcagctttggggtggggaccagaggtggcataggagatgttccctgttggagccacagtgagtctgtttgtgagcagcttgtgggtttgtacttagagagactgtcctcaccagccattactatcaacttcatgatattaatccagttgccttggtaacaagtcagatggagccagaaaagcagaaaagcaaacaacctctccaaccctaagatggagacccaggcatggctgaggagcctctgtccatcagtccattgctttctctgtcccttttttcccttctggactctggaagacaagagagtcaaatccctcaggggcagggaactaaaggacagagaacgctgtggtgccctcaccctctagagcgacactatccaatgtggtagccactagctgcatgtggctattttaattttagttattttaaattaaataaacccagtttctcagcggtgctaaccacatttcaaatgctcaattgccttacagtctagtggctccccctattgggtggcacagatgtaaaatattttcatcatctcggaaggttgagttggaccacactgctccaaaatatcccctcctgcgcatcttaattacccataataagagatgatgggattttaaatgtaaacaattggcagttttggagacacaattggggcagtgatggcagccatgaccagacattttccagtgttttttttttttctaagacggaatctcactctgtcacccaggcttgagtacagtggcacagtctcggctcactgcaacctctgccaactgggtttaagtgattcttctgcctcagcctcctgagtagctgggactacaggcgcctgccaccacacttggctaattttttgtatttttagtagagatggtgttttaccatgttggccaggctggtctcaaactcctgacctcatgatctgcccaccttaacctcccaaagtgctgggattacaggtgtgagccaccgcacgcagccattttccagtgtttttaaatgtaaacccaatagtggacctcaggccctttcctctggcctccctctgcctcctcctgatggttcctgctggtctctccctggctgggaccctgggaggaggatccaggtcggactttctgcaagagatgcccgacctcttctgggctagttaggcaagggcagccctccttagccagactcagctgcccacagcctggctttgatgagccccatgtcccaagcctgggtcattatgacctctagctgttcatggatggagatgctgctctcagagaatttcctttccaccagcttctagagctggcaaggactgaccctagtgtcctgaccctagccctctggcccctgcagagaagggttctgggaggactaggggaaccaggggggatctgcttagttttcttgaacagtctcaggtgtggactccacatatctcatgtcctagccctctcccctggggcaggctgcaccattggcatgtagtaaagggcagggctgacaactctgttcaaatggtagtggctttctggagtcctgtgttgagaaggattctgaggttgcatccaattttagcaggaaagagtgctgtgatcgttagctgcatcagacatgggcatggatgtaggctgtgccaacacgcatgcttcttcccagacactccttggaatcaagagaatcaatgaaccaagcagtgttcataagtctcatactttgtaccaggcactctgttaagccccatgtatccatatgtgtgctaggagggagggtaaaatataaaaaggcacaagccttggtcctgtgctcaaggagctcccagtttcaggtacaggaaagtggcatgtcatgtgttggaagtgatacctattgaatgagcatccccaaccagcagcggccctgagctgaggcagaagctatcattgtggactggggcatcagggaaggcctcctagaggagtgtaaattggggatagtttgaaaagatggatggggaggaggggtgagtaggaggcatttcaggccttggctggggagggggtttcagtggagcaaatcttttctgggatggaggccttaagaatgacagtggcttttgcctccccaaggggacacccgttccagtgagatgcccgagctcacctccatgcacaccctcttacttcgggagcacaaccggctggccacagagctcaagagcctgaaccctaggtgggatggggagaggctctaccaggaagcccggaagatcgtgggggccatggtccaggtaggccgtcttgaacaccgggcacacgggatccagatgtgtccctgcaacatcctagctgtgtgaccttgggcaagttcctaacgctcctgagccttgccttcttcatccatgaggctgtaaggattataatacatatatgaaaacacctttcagatagtaagtgcttgacaaagcctccttcccttccctctccttcttcgcaggtttgctccctgcagtcttctttcctgtgggtctgttattggtgttgggagggttgaatgtttggtttagcgcccaagtagctgttcagtaaattcttcttccctccatctcactgtcactcttagctcctttacccactcacctcttctttttaaaattaaaaaaattatagggctgggcgcggtggctcatgcctgtaatcccagcactttgggaggcggaggcgggtggatcacgaggtcaggagatcaagaccatgctggctaacacggtgaaaccccatctctactaaaaatacaaaaattagccgggcgtggtggcgggcacctgtagtcccagctacttgggaggctgaggcaggagaatggcgtgaacctgggaggcagagcttgcagtgagctgagatggcgctgctgcactccagcctgggtgacagagcgagactccatctcaaaataaataaataaataaaataaaatttaaaaattattattattattttatttttattttttgatacagggtcttaccctgttgcccaggctggagtgcagtggtgcgatcttggctcactgcaacctccacctttcaggctcaagccattctcccatctcagccttctgagtagctgggatttcaagcacgggccaccacgcccggctaatttttgtattttttgtagagacggggtttcgccacgttacccagtgtggtctcaaactcctgggctcaagtaatccgccctcctcgacctcccaaatccctgggattacaggcacgagtcactgtgttcagcccactcacctcttctttttggctctgtcataatccacccaatgtccttagcctcatttacccctggggcaatgttcctggttctgtctctcaacatctggtgcttcattgcccccaccctctccctcagaggcagaggcagacatacacacactcacacacacacacacacacacacacacacacacacactcctagattctggaggagagagttttcggtgctaagggtgagtttttgatttgcactaagaactcaagtgaaattcatttacactccaaaataacttctagactctagaatgtagagtgagactattccatgtcttcacttttcacagggaaaatcatgccagaatggcccttcgttccttcctgcctccctgctttccacaaacctaaactgagccttactgtgggcaggcacttggtgggcactgtgaagaatttcaacaacttcaatttcccttgctctcaaggactttataagatagttgcagaaatgagacattaataacttgaggacaaggaagttatcacaatgactaaaaaagtgatttgctatttagtcctctaaggcagagggcaatataattatccttaatgtacatttgaggaactcaggctcagagaggttaataattggtccaaggtcacccagccagcaagcagtagaactctatttatgcctctcagtgccactctgttaggcccaggtccggtattgtgggaggctattccctgaccatagagggatggaaggggtccccgaagccaagagcaggcagagactctggccctcctgtgctgccaggcggcatttgctgtggaggagtgggtggagaggccattccaaatgacttgtctttagatcatcacttaccgggactacctgcccctggtgctggggccaacggccatgaggaagtacctgcccacgtaccgttcctacaatgactcagtggacccacgcatcgccaacgtcttcaccaatgccttccgctacggccacaccctcatccaacccttcatgttccgcctggacaatcggtaccagcccatggaacccaacccccgtgtccccctcagcagggtcttttttgcctcctggagggtcgtgctggaaggtaagcaggacctaggccaggagcgagtgggctgacagctaaaggtggggtagggatcaccttggctctagggagctagggtggggagcagtctgctttcctcccatcttggagatctggtctgactctctagcctcagttcctctgactctgcttccatatctgataataaacagtggggtggggatggccctcagagggaactggctacttcctatgtgttgtggctcgctgtgacccaggaagccagggcctgggagcatcccaatcttgcaagtctgaatggcataatctcctgagacctatatgtccctggggtcatgtagtgaccggtgaggacctgctcactggggccaccaccttggcaccaggcactgcttgtgcccagccctcttctcgaatcctcctgaccctacctggacttgtccctgactccaatctgagctctgatactgagccagatacttcccctgacctggctcctctggtccccaggtggcattgaccccatcctccggggcctcatggccacccctgccaagctgaatcgtcagaaccaaattgcagtggatgagatccgggagcgattgtttgagcaggtcatgaggattgggctggacctgcctgctctgaacatgcagcgcagcagggaccacggcctcccaggtgaggggctgcaggagtctcccctgatgctcacctcccctgagctgcctcctaggtagcccatcaccccccttcccactctagggtccctgccctctccaaagcatattagaggcactttgctctcaggaagtagcctgaggccaggcccctgccttttcccggacccacctgataaatttccagctcctctcaacctcctttgcatgctgtaattctcatattaggggcatcgtcatcataatgataacccacagtctgaaaatctgtctctgtcatcattccattttgcttcattgtacgttaactctgggggaagagattattattgccttcattttactgatgaggaaactgaggcttgatgagattcagaacctggccaggttctctagccaagtcagtggcaaagctgaaatttgaagccagattagcctaacctcaaagcctgtgcctatgttatggggtagcccatgtggctgaggcttctagacacatttcacctctcatgggtcagagacagacacatcgggctgctctggagggggacaaggagatgtccctattcttggacccagcaggaactgtggcagtttagggtttgccttatggtaggagggcaagagaaagacagagagggtcccagagaggcccagttgtgccccttggtctaagccaaaggtacagggttccttgaggtgaggtccttccctccctctatgaccttggttgtgttgggaaggtgggttttctgggctgctggcgatatgtgaatcttccctgctgtctccagtgacctccccaccttgaagcagagagacctgcccatagccacctgtcccctcccccatgcaggatacaatgcctggaggcgcttctgtgggctcccgcagcctgaaactgtgggccagctgggcacggtgctgaggaacctgaaattggcgaggaaactgatggagcagtatggcacgcccaacaacatcgacatctggatgggcggcgtgtccgagcctctgaagcgcaaaggccgcgtgggcccactcctcgcctgcatcatcggtacccagttcaggaagctccgggatggtgatcggtgaggaggggcaggcgtcgtgggccgctgggtggctgtgggcccatccttgactctcttggagcccaaatttcctcctgtcagttgaaggactggagggagtcagtaattttccagtgtgttccaggaatcctccagatgccctggagtgcccctaatgtgccctgaacctgttgggggtgcagcaaggaaagacctggacccctggttgtaaagggtggaagatagaaaagtgccacccttagctacttcttcccatgggtttcactgtgccaccatgtgggtgtcagtcaccagtgggcagtcccctcccagctttcccacagctccccttagtgtcatttcctcgtggtcctgatgtcttcatgtctagttcttgcttagcctgtactgcacctttgggaaaattagaaaaaggtgcccctctctgggtgggcgaattataaaccacccccaagattctcttccactcctgtggatgcagctcctggccagggcacagggcttcaggagtgtgtgtgggcccgggtccccctccagcatggtgccctggaggccgccgggctaggggtaagggaaaggccactgggcagctgtgctttactctgcacgatgagtggagcatcacttgtgtgaaagcccctgggctgcccaagggcctggggccctcctgtgcttccaggtggcatttgttgtggctttgttatatcctgggagcagcacaagcccatcgatgccctgccagcccagaatatccttgggcacagtgtccatgggtgttccccatgcaggttttggtgggagaacgagggtgtgttcagcatgcagcagcgacaggccctggcccagatctcattgccccggatcatctgcgacaacacaggcatcaccaccgtgtctaagaacaacatcttcatgtccaactcatatccccgggactttgtcaactgcagtacacttcctgcattgaacctggcttcctggagggaagcctcctagaggccaggtaagggggtgcagcagtgaggggtatatctgggctggccagttggaaccacggagatctccttgccctagatgagcccagccctgttctgggtgcagctgagaaaatgagtgactagacgttcatttgtgtgctcatgtatgtgcgaagtatataaattggcttttcatgcgtgtgtgttgtctgaacatggggagtgtttcatgggttatgtgtatgtgccatttatgtgagtgtgtgtttgtgctgatgagaatactgagtatgtggaaggcagcagagcggactggtgaggagcacagctcaggaactagactgcctgggttccaatcctggctctgtggcttgctagctatgtgaccttgagcaaattaccctccttaaacaagagttttcttccttgtaaattacatctgtcatggtttcttggagggcccacttgtatcctctggttcttcatttattgagcacctactacatgcaaggcactgtactaggcgtgagaagcatatagaggcaagaaagagataccaagatgccatctgtgtcctggttagcagagctggaccagtggtgccttggagggataagccagctgcagctgggctgtgtggttgacttatgggcccagccagccaggctcaggccatggctcccctttttcttcctcaccctgatttcttgcttattcactgaagttctcctgaagaggaactgggcctgttgccctttctgtaccatttatttgctcccaatgtttatgataataaaggcaccgctgatggggacctcc

SEQ ID NO: 374 - protein, 745 aa, Homo sapiens
  MISC_FEATURE: MPO protein Accession Number: NP_000241
MGVPFFSSLRCMVDLGPCWAGGLTAEMKLLLALAGLLAILATPQPSEGAAPAVLGEVDTSLVLSSMEEAKQLVDKAYKERRESIKQRLRSGSASPMELLSYFKQPVAATRTAVRAADYLHVALDLLERKLRSLWRRPFNVTDVLTPAQLNVLSKSSGCAYQDVGVTCPEQDKYRTITGMCNNRRSPTLGASNRAFVRWLPAEYEDGFSLPYGWTPGVKRNGFPVALARAVSNEIVRFPTDQLTPDQERSLMFMQWGQLLDHDLDFTPEPAARASFVTGVNCETSCVQQPPCFPLKIPPNDPRIKNQADCIPFFRSCPACPGSNITIRNQINALTSFVDASMVYGSEEPLARNLRNMSNQLGLLAVNQRFQDNGRALLPFDNLHDDPCLLTNRSARIPCFLAGDTRSSEMPELTSMHTLLLREHNRLATELKSLNPRWDGERLYQEARKIVGAMVQIITYRDYLPLVLGPTAMRKYLPTYRSYNDSVDPRIANVFTNAFRYGHTLIQPFMFRLDNRYQPMEPNPRVPLSRVFFASWRVVLEGGIDPILRGLMATPAKLNRQNQIAVDEIRERLFEQVMRIGLDLPALNMQRSRDHGLPGYNAWRRFCGLPQPETVGQLGTVLRNLKLARKLMEQYGTPNNIDIWMGGVSEPLKRKGRVGPLLACIIGTQFRKLRDGDRFWWENEGVFSMQQRQALAQISLPRIICDNTGITTVSKNNIFMSNSYPRDFVNCSTLPALNLASWREAS

SEQ ID NO: 375 - protein, 1625 aa, Artificial Sequence
  dScCasFok, SV40+bipartite SV40 NLS (TG14280)
  misc_feature: synthetic
MAVTPKKKRKVGGSGSQLVKSELEEKKSELRHKLKYVPHEYIELIEIARNSTQDRILEMKVMEFFMKVYGYRGKHLGGSRKPDGAIYTVGSPIDYGVIVDTKAYSGGYNLPIGQADEMQRYVEENQTRNKHINPNEWWKVYPSSVTEFKFLFVSGHFKGNYKAQLTRLNHITNCNGAVLSVEELLIGGEMIKAGTLTLEEVRRKFNNGEINFSGSETPGTSESATPESMEKKYSIGLAIGTNSVGWAVITDDYKVPSKKFKVLGNTNRKSIKKNLMGALLFDSGETAEATRLKRTARRRYTRRKNRIRYLQEIFANEMAKLDDSFFQRLEESFLVEEDKKNERHPIFGNLADEVAYHRNYPTIYHLRKKLADSPEKADLRLIYLALAHIIKFRGHFLIEGKLNAENSDVAKLFYQLIQTYNQLFEESPLDEIEVDAKGILSARLSKSKRLEKLIAVFPNEKKNGLFGNIIALALGLTPNFKSNFDLTEDAKLQLSKDTYDDDLDELLGQIGDQYADLFSAAKNLSDAILLSDILRSNSEVTKAPLSASMVKRYDEHHQDLALLKTLVRQQFPEKYAEIFKDDTKNGYAGYVGIGIKHRKRTTKLATQEEFYKFIKPILEKMDGAEELLAKLNRDDLLRKQRTFDNGSIPHQIHLKELHAILRRQEEFYPFLKENREKIEKILTFRIPYYVGPLARGNSRFAWLTRKSEEAITPWNFEEVVDKGASAQSFIERMTNFDEQLPNKKVLPKHSLLYEYFTVYNELTKVKYVTERMRKPEFLSGEQKKAIVDLLFKTNRKVTVKQLKEDYFKKIECFDSVEIIGVEDRFNASLGTYHDLLKIIKDKDFLDNEENEDILEDIVLTLTLFEDREMIEERLKTYAHLFDDKVMKQLKRRHYTGWGRLSRKMINGIRDKQSGKTILDFLKSDGFSNRNFMQLIHDDSLTFKEEIEKAQVSGQGDSLHEQIADLAGSPAIKKGILQTVKIVDELVKVMGHKPENIVIEMARENQTTTKGLQQSRERKKRIEEGIKELESQILKENPVENTQLQNEKLYLYYLQNGRDMYVDQELDINRLSDYDVDAIVPQSFIKDDSIDNKVLTRSVENRGKSDNVPSEEVVKKMKNYWRQLLNAKLITQRKFDNLTKAERGGLSEADKAGFIKRQLVETRQITKHVARILDSRMNTKRDKNDKPIREVKVITLKSKLVSDFRKDFQLYKVRDINNYHHAHDAYLNAVVGTALIKKYPKLESEFVYGDYKVYDVRKMIAKSEQEIGKATAKRFFYSNIMNFFKTEVKLANGEIRKRPLIETNGETGEVVWNKEKDFATVRKVLAMPQVNIVKKTEVQTGGFSKESILSKRESAKLIPRKKGWDTRKYGGFGSPTVAYSILVVAKVEKGKAKKLKSVKVLVGITIMEKGSYEKDPIGFLEAKGYKDIKKELIFKLPKYSLFELENGRRRMLASATELQKANELVLPQHLVRLLYYTQNISATTGSNNLGYIEQHREEFKEIFEKIIDFSEKYILKNKVNSNLKSSFDEQFAVSDSILLSNSFVSLLKYTSFGASGGFTFLDLDVKQGRLRYQTVTEVLDATLIYQSITGLYETRTDLSQLGGDSGGSKRTADGSEFESPKKKRKV

SEQ ID NO: 376 - protein, 1631 aa, Artificial Sequence
  dScCasFok, SV40+bipartite SV40 NLS, 6xHis (TG14412)
  misc_feature: synthetic
MAVTPKKKRKVGGSGSQLVKSELEEKKSELRHKLKYVPHEYIELIEIARNSTQDRILEMKVMEFFMKVYGYRGKHLGGSRKPDGAIYTVGSPIDYGVIVDTKAYSGGYNLPIGQADEMQRYVEENQTRNKHINPNEWWKVYPSSVTEFKFLFVSGHFKGNYKAQLTRLNHITNCNGAVLSVEELLIGGEMIKAGTLTLEEVRRKFNNGEINFSGSETPGTSESATPESMEKKYSIGLAIGTNSVGWAVITDDYKVPSKKFKVLGNTNRKSIKKNLMGALLFDSGETAEATRLKRTARRRYTRRKNRIRYLQEIFANEMAKLDDSFFQRLEESFLVEEDKKNERHPIFGNLADEVAYHRNYPTIYHLRKKLADSPEKADLRLIYLALAHIIKFRGHFLIEGKLNAENSDVAKLFYQLIQTYNQLFEESPLDEIEVDAKGILSARLSKSKRLEKLIAVFPNEKKNGLFGNIIALALGLTPNFKSNFDLTEDAKLQLSKDTYDDDLDELLGQIGDQYADLFSAAKNLSDAILLSDILRSNSEVTKAPLSASMVKRYDEHHQDLALLKTLVRQQFPEKYAEIFKDDTKNGYAGYVGIGIKHRKRTTKLATQEEFYKFIKPILEKMDGAEELLAKLNRDDLLRKQRTFDNGSIPHQIHLKELHAILRRQEEFYPFLKENREKIEKILTFRIPYYVGPLARGNSRFAWLTRKSEEAITPWNFEEVVDKGASAQSFIERMTNFDEQLPNKKVLPKHSLLYEYFTVYNELTKVKYVTERMRKPEFLSGEQKKAIVDLLFKTNRKVTVKQLKEDYFKKIECFDSVEIIGVEDRFNASLGTYHDLLKIIKDKDFLDNEENEDILEDIVLTLTLFEDREMIEERLKTYAHLFDDKVMKQLKRRHYTGWGRLSRKMINGIRDKQSGKTILDFLKSDGFSNRNFMQLIHDDSLTFKEEIEKAQVSGQGDSLHEQIADLAGSPAIKKGILQTVKIVDELVKVMGHKPENIVIEMARENQTTTKGLQQSRERKKRIEEGIKELESQILKENPVENTQLQNEKLYLYYLQNGRDMYVDQELDINRLSDYDVDAIVPQSFIKDDSIDNKVLTRSVENRGKSDNVPSEEVVKKMKNYWRQLLNAKLITQRKFDNLTKAERGGLSEADKAGFIKRQLVETRQITKHVARILDSRMNTKRDKNDKPIREVKVITLKSKLVSDFRKDFQLYKVRDINNYHHAHDAYLNAVVGTALIKKYPKLESEFVYGDYKVYDVRKMIAKSEQEIGKATAKRFFYSNIMNFFKTEVKLANGEIRKRPLIETNGETGEVVWNKEKDFATVRKVLAMPQVNIVKKTEVQTGGFSKESILSKRESAKLIPRKKGWDTRKYGGFGSPTVAYSILVVAKVEKGKAKKLKSVKVLVGITIMEKGSYEKDPIGFLEAKGYKDIKKELIFKLPKYSLFELENGRRRMLASATELQKANELVLPQHLVRLLYYTQNISATTGSNNLGYIEQHREEFKEIFEKIIDFSEKYILKNKVNSNLKSSFDEQFAVSDSILLSNSFVSLLKYTSFGASGGFTFLDLDVKQGRLRYQTVTEVLDATLIYQSITGLYETRTDLSQLGGDSGGSKRTADGSEFESPKKKRKVHHHHHH

SEQ ID NO: 377 - protein, 1625 aa, Artificial Sequence
  dScCasFok, ancestral RuvC+Rec1/2  domain, SV40 and bipartite SV40 NLS (TG14314)
  misc_feature: synthetic
MAVTPKKKRKVGGSGSQLVKSELEEKKSELRHKLKYVPHEYIELIEIARNSTQDRILEMKVMEFFMKVYGYRGKHLGGSRKPDGAIYTVGSPIDYGVIVDTKAYSGGYNLPIGQADEMQRYVEENQTRNKHINPNEWWKVYPSSVTEFKFLFVSGHFKGNYKAQLTRLNHITNCNGAVLSVEELLIGGEMIKAGTLTLEEVRRKFNNGEINFSGSETPGTSESATPESMEKKYSIGLAIGTNSVGWAVITDDYKVPSKKFKVLGNTNRKSIKKNLMGALLFDSGETAEATRLKRTARRRYTRRKNRIRYLQEIFANEMAKLDDSFFQRLEESFLVEEDKKNERHPIFGNLADEVAYHRNYPTIYHLRKKLADSPEKADLRLIYLALAHIIKFRGHFLIEGKLNAENSDVAKLFYQLIQTYNQLFEESPLDEIEVDAKGILSARLSKSKRLEKLIAVFPNEKKNGLFGNIIALALGLTPNFKSNFDLTEDAKLQLSKDTYDDDLDELLGQIGDQYADLFSAAKNLSDAILLSDILRSNSEVTKAPLSASMVKRYDEHHQDLALLKTLVRQQLPEKYKEIFSDQSKNGYAGYIDIGIKHRKRTTKRTSQEEFYKFIKPILEKMDGAEELLAKLNREDLLRKQRTFDNGSIPHQIHLGELHAILRRQEEFYPFLKDNREKIEKILTFRIPYYVGPLARGNSRFAWMTRKSDEAITPWNFEEVVDKGASAQSFIERMTNFDEYLPNKKVLPKHSLLYEYFTVYNELTKVKYVTEGMRKPEFLSGEQKEAIVDLLFKTNRKVTVKQLKEDYFKKIECFDSVEIIGVEDRFNASLGTYHDLLKIIKDKDFLDNEENEDILEDIVLTLTLFEDREMIEERLKKYANLFDDKVMKQLKRRHYTGWGRLSRKMINGIRDKQSGKTILDFLKSDGFSNRNFMQLIHDDSLTFKEEIEKAQVSGQGDSLHEQIADLAGSPAIKKGILQTVKIVDELVKVMGHKPENIVIEMARENQTTTKGLQQSRERKKRIEEGIKELESQILKENPVENTQLQNEKLYLYYLQNGRDMYVDQELDINRLSDYDVDAIVPQSFIKDDSIDNKVLTRSVENRGKSDNVPSEEVVKKMKNYWRQLLNAKLITQRKFDNLTKAERGGLSEADKAGFIKRQLVETRQITKHVARILDSRMNTKRDKNDKPIREVKVITLKSKLVSDFRKDFQLYKVRDINNYHHAHDAYLNAVVGTALIKKYPKLESEFVYGDYKVYDVRKMIAKSEQEIGKATAKRFFYSNIMNFFKTEVKLANGEIRKRPLIETNGETGEVVWNKEKDFATVRKVLAMPQVNIVKKTEVQTGGFSKESILSKRESAKLIPRKKGWDTRKYGGFGSPTVAYSILVVAKVEKGKAKKLKSVKVLVGITIMEKGSYEKDPIGFLEAKGYKDIKKELIFKLPKYSLFELENGRRRMLASATELQKANELVLPQHLVRLLYYTQNISATTGSNNLGYIEQHREEFKEIFEKIIDFSEKYILKNKVNSNLKSSFDEQFAVSDSILLSNSFVSLLKYTSFGASGGFTFLDLDVKQGRLRYQTVTEVLDATLIYQSITGLYETRTDLSQLGGDSGGSKRTADGSEFESPKKKRKV

SEQ ID NO: 378 - protein, 1506 aa, Artificial Sequence
  dScCasFok, HNHdelta, SV40+bipartiteSV40 NLS (TG14297)
  misc_feature: synthetic
MAVTPKKKRKVGGSGSQLVKSELEEKKSELRHKLKYVPHEYIELIEIARNSTQDRILEMKVMEFFMKVYGYRGKHLGGSRKPDGAIYTVGSPIDYGVIVDTKAYSGGYNLPIGQADEMQRYVEENQTRNKHINPNEWWKVYPSSVTEFKFLFVSGHFKGNYKAQLTRLNHITNCNGAVLSVEELLIGGEMIKAGTLTLEEVRRKFNNGEINFSGSETPGTSESATPESMEKKYSIGLAIGTNSVGWAVITDDYKVPSKKFKVLGNTNRKSIKKNLMGALLFDSGETAEATRLKRTARRRYTRRKNRIRYLQEIFANEMAKLDDSFFQRLEESFLVEEDKKNERHPIFGNLADEVAYHRNYPTIYHLRKKLADSPEKADLRLIYLALAHIIKFRGHFLIEGKLNAENSDVAKLFYQLIQTYNQLFEESPLDEIEVDAKGILSARLSKSKRLEKLIAVFPNEKKNGLFGNIIALALGLTPNFKSNFDLTEDAKLQLSKDTYDDDLDELLGQIGDQYADLFSAAKNLSDAILLSDILRSNSEVTKAPLSASMVKRYDEHHQDLALLKTLVRQQFPEKYAEIFKDDTKNGYAGYVGIGIKHRKRTTKLATQEEFYKFIKPILEKMDGAEELLAKLNRDDLLRKQRTFDNGSIPHQIHLKELHAILRRQEEFYPFLKENREKIEKILTFRIPYYVGPLARGNSRFAWLTRKSEEAITPWNFEEVVDKGASAQSFIERMTNFDEQLPNKKVLPKHSLLYEYFTVYNELTKVKYVTERMRKPEFLSGEQKKAIVDLLFKTNRKVTVKQLKEDYFKKIECFDSVEIIGVEDRFNASLGTYHDLLKIIKDKDFLDNEENEDILEDIVLTLTLFEDREMIEERLKTYAHLFDDKVMKQLKRRHYTGWGRLSRKMINGIRDKQSGKTILDFLKSDGFSNRNFMQLIHDDSLTFKEEIEKAQVSGQGDSLHEQIADLAGSPAIKKGILQTVKIVDELVKVMGHKPENIVIEMARENQTTTKGLQQSRERKKRGGSGGLSEADKAGFIKRQLVETRQITKHVARILDSRMNTKRDKNDKPIREVKVITLKSKLVSDFRKDFQLYKVRDINNYHHAHDAYLNAVVGTALIKKYPKLESEFVYGDYKVYDVRKMIAKSEQEIGKATAKRFFYSNIMNFFKTEVKLANGEIRKRPLIETNGETGEVVWNKEKDFATVRKVLAMPQVNIVKKTEVQTGGFSKESILSKRESAKLIPRKKGWDTRKYGGFGSPTVAYSILVVAKVEKGKAKKLKSVKVLVGITIMEKGSYEKDPIGFLEAKGYKDIKKELIFKLPKYSLFELENGRRRMLASATELQKANELVLPQHLVRLLYYTQNISATTGSNNLGYIEQHREEFKEIFEKIIDFSEKYILKNKVNSNLKSSFDEQFAVSDSILLSNSFVSLLKYTSFGASGGFTFLDLDVKQGRLRYQTVTEVLDATLIYQSITGLYETRTDLSQLGGDSGGSKRTADGSEFESPKKKRKV

SEQ ID NO: 379 - protein, 1513 aa, Artificial Sequence
  dScCasFok, HNHdelta with longer linker, SV40+bipartiteSV40 NLS (TG14298)
  misc_feature: synthetic
MAVTPKKKRKVGGSGSQLVKSELEEKKSELRHKLKYVPHEYIELIEIARNSTQDRILEMKVMEFFMKVYGYRGKHLGGSRKPDGAIYTVGSPIDYGVIVDTKAYSGGYNLPIGQADEMQRYVEENQTRNKHINPNEWWKVYPSSVTEFKFLFVSGHFKGNYKAQLTRLNHITNCNGAVLSVEELLIGGEMIKAGTLTLEEVRRKFNNGEINFSGSETPGTSESATPESMEKKYSIGLAIGTNSVGWAVITDDYKVPSKKFKVLGNTNRKSIKKNLMGALLFDSGETAEATRLKRTARRRYTRRKNRIRYLQEIFANEMAKLDDSFFQRLEESFLVEEDKKNERHPIFGNLADEVAYHRNYPTIYHLRKKLADSPEKADLRLIYLALAHIIKFRGHFLIEGKLNAENSDVAKLFYQLIQTYNQLFEESPLDEIEVDAKGILSARLSKSKRLEKLIAVFPNEKKNGLFGNIIALALGLTPNFKSNFDLTEDAKLQLSKDTYDDDLDELLGQIGDQYADLFSAAKNLSDAILLSDILRSNSEVTKAPLSASMVKRYDEHHQDLALLKTLVRQQFPEKYAEIFKDDTKNGYAGYVGIGIKHRKRTTKLATQEEFYKFIKPILEKMDGAEELLAKLNRDDLLRKQRTFDNGSIPHQIHLKELHAILRRQEEFYPFLKENREKIEKILTFRIPYYVGPLARGNSRFAWLTRKSEEAITPWNFEEVVDKGASAQSFIERMTNFDEQLPNKKVLPKHSLLYEYFTVYNELTKVKYVTERMRKPEFLSGEQKKAIVDLLFKTNRKVTVKQLKEDYFKKIECFDSVEIIGVEDRFNASLGTYHDLLKIIKDKDFLDNEENEDILEDIVLTLTLFEDREMIEERLKTYAHLFDDKVMKQLKRRHYTGWGRLSRKMINGIRDKQSGKTILDFLKSDGFSNRNFMQLIHDDSLTFKEEIEKAQVSGQGDSLHEQIADLAGSPAIKKGILQTVKIVDELVKVMGHKPENIVIEMARENQTTTKGLQQSRERKKRGGSAGGTGGSGGLSEADKAGFIKRQLVETRQITKHVARILDSRMNTKRDKNDKPIREVKVITLKSKLVSDFRKDFQLYKVRDINNYHHAHDAYLNAVVGTALIKKYPKLESEFVYGDYKVYDVRKMIAKSEQEIGKATAKRFFYSNIMNFFKTEVKLANGEIRKRPLIETNGETGEVVWNKEKDFATVRKVLAMPQVNIVKKTEVQTGGFSKESILSKRESAKLIPRKKGWDTRKYGGFGSPTVAYSILVVAKVEKGKAKKLKSVKVLVGITIMEKGSYEKDPIGFLEAKGYKDIKKELIFKLPKYSLFELENGRRRMLASATELQKANELVLPQHLVRLLYYTQNISATTGSNNLGYIEQHREEFKEIFEKIIDFSEKYILKNKVNSNLKSSFDEQFAVSDSILLSNSFVSLLKYTSFGASGGFTFLDLDVKQGRLRYQTVTEVLDATLIYQSITGLYETRTDLSQLGGDSGGSKRTADGSEFESPKKKRKV

SEQ ID NO: 380 - protein, 1616 aa, Artificial Sequence
  dScCasFok, HNH replaced with SSB, SV40+bipartiteSV40 NLS (TG14299)
  misc_feature: synthetic
MAVTPKKKRKVGGSGSQLVKSELEEKKSELRHKLKYVPHEYIELIEIARNSTQDRILEMKVMEFFMKVYGYRGKHLGGSRKPDGAIYTVGSPIDYGVIVDTKAYSGGYNLPIGQADEMQRYVEENQTRNKHINPNEWWKVYPSSVTEFKFLFVSGHFKGNYKAQLTRLNHITNCNGAVLSVEELLIGGEMIKAGTLTLEEVRRKFNNGEINFSGSETPGTSESATPESMEKKYSIGLAIGTNSVGWAVITDDYKVPSKKFKVLGNTNRKSIKKNLMGALLFDSGETAEATRLKRTARRRYTRRKNRIRYLQEIFANEMAKLDDSFFQRLEESFLVEEDKKNERHPIFGNLADEVAYHRNYPTIYHLRKKLADSPEKADLRLIYLALAHIIKFRGHFLIEGKLNAENSDVAKLFYQLIQTYNQLFEESPLDEIEVDAKGILSARLSKSKRLEKLIAVFPNEKKNGLFGNIIALALGLTPNFKSNFDLTEDAKLQLSKDTYDDDLDELLGQIGDQYADLFSAAKNLSDAILLSDILRSNSEVTKAPLSASMVKRYDEHHQDLALLKTLVRQQFPEKYAEIFKDDTKNGYAGYVGIGIKHRKRTTKLATQEEFYKFIKPILEKMDGAEELLAKLNRDDLLRKQRTFDNGSIPHQIHLKELHAILRRQEEFYPFLKENREKIEKILTFRIPYYVGPLARGNSRFAWLTRKSEEAITPWNFEEVVDKGASAQSFIERMTNFDEQLPNKKVLPKHSLLYEYFTVYNELTKVKYVTERMRKPEFLSGEQKKAIVDLLFKTNRKVTVKQLKEDYFKKIECFDSVEIIGVEDRFNASLGTYHDLLKIIKDKDFLDNEENEDILEDIVLTLTLFEDREMIEERLKTYAHLFDDKVMKQLKRRHYTGWGRLSRKMINGIRDKQSGKTILDFLKSDGFSNRNFMQLIHDDSLTFKEEIEKAQVSGQGDSLHEQIADLAGSPAIKKGILQTVKIVDELVKVMGHKPENIVIEMARENQTTTKGLQQSRERKKRGGSTTETFVKDIKPGLKNLNLIFIVLETGRVTKTKDGHEVRTCKVADKTGSINISVWDDVGNLIQPGDIIRLTKGYASVFKGCLTLYTGRGGDLQKIGEFCMVYSEVPNFSEPGGLSEADKAGFIKRQLVETRQITKHVARILDSRMNTKRDKNDKPIREVKVITLKSKLVSDFRKDFQLYKVRDINNYHHAHDAYLNAVVGTALIKKYPKLESEFVYGDYKVYDVRKMIAKSEQEIGKATAKRFFYSNIMNFFKTEVKLANGEIRKRPLIETNGETGEVVWNKEKDFATVRKVLAMPQVNIVKKTEVQTGGFSKESILSKRESAKLIPRKKGWDTRKYGGFGSPTVAYSILVVAKVEKGKAKKLKSVKVLVGITIMEKGSYEKDPIGFLEAKGYKDIKKELIFKLPKYSLFELENGRRRMLASATELQKANELVLPQHLVRLLYYTQNISATTGSNNLGYIEQHREEFKEIFEKIIDFSEKYILKNKVNSNLKSSFDEQFAVSDSILLSNSFVSLLKYTSFGASGGFTFLDLDVKQGRLRYQTVTEVLDATLIYQSITGLYETRTDLSQLGGDSGGSKRTADGSEFESPKKKRKV

SEQ ID NO: 381 - protein, 1488 aa, Artificial Sequence
  dScCasFok, HNHdelta with longer deletion SV40+bipartiteSV40 NLS (TG14300)
  misc_feature: synthetic
MAVTPKKKRKVGGSGSQLVKSELEEKKSELRHKLKYVPHEYIELIEIARNSTQDRILEMKVMEFFMKVYGYRGKHLGGSRKPDGAIYTVGSPIDYGVIVDTKAYSGGYNLPIGQADEMQRYVEENQTRNKHINPNEWWKVYPSSVTEFKFLFVSGHFKGNYKAQLTRLNHITNCNGAVLSVEELLIGGEMIKAGTLTLEEVRRKFNNGEINFSGSETPGTSESATPESMEKKYSIGLAIGTNSVGWAVITDDYKVPSKKFKVLGNTNRKSIKKNLMGALLFDSGETAEATRLKRTARRRYTRRKNRIRYLQEIFANEMAKLDDSFFQRLEESFLVEEDKKNERHPIFGNLADEVAYHRNYPTIYHLRKKLADSPEKADLRLIYLALAHIIKFRGHFLIEGKLNAENSDVAKLFYQLIQTYNQLFEESPLDEIEVDAKGILSARLSKSKRLEKLIAVFPNEKKNGLFGNIIALALGLTPNFKSNFDLTEDAKLQLSKDTYDDDLDELLGQIGDQYADLFSAAKNLSDAILLSDILRSNSEVTKAPLSASMVKRYDEHHQDLALLKTLVRQQFPEKYAEIFKDDTKNGYAGYVGIGIKHRKRTTKLATQEEFYKFIKPILEKMDGAEELLAKLNRDDLLRKQRTFDNGSIPHQIHLKELHAILRRQEEFYPFLKENREKIEKILTFRIPYYVGPLARGNSRFAWLTRKSEEAITPWNFEEVVDKGASAQSFIERMTNFDEQLPNKKVLPKHSLLYEYFTVYNELTKVKYVTERMRKPEFLSGEQKKAIVDLLFKTNRKVTVKQLKEDYFKKIECFDSVEIIGVEDRFNASLGTYHDLLKIIKDKDFLDNEENEDILEDIVLTLTLFEDREMIEERLKTYAHLFDDKVMKQLKRRHYTGWGRLSRKMINGIRDKQSGKTILDFLKSDGFSNRNFMQLIHDDSLTFKEEIEKAQVSGQGDSLHEQIADLAGSPAIKKGILQTVKIVDELVKVMGHKPENIVIEMARGGSGGLSEADKAGFIKRQLVETRQITKHVARILDSRMNTKRDKNDKPIREVKVITLKSKLVSDFRKDFQLYKVRDINNYHHAHDAYLNAVVGTALIKKYPKLESEFVYGDYKVYDVRKMIAKSEQEIGKATAKRFFYSNIMNFFKTEVKLANGEIRKRPLIETNGETGEVVWNKEKDFATVRKVLAMPQVNIVKKTEVQTGGFSKESILSKRESAKLIPRKKGWDTRKYGGFGSPTVAYSILVVAKVEKGKAKKLKSVKVLVGITIMEKGSYEKDPIGFLEAKGYKDIKKELIFKLPKYSLFELENGRRRMLASATELQKANELVLPQHLVRLLYYTQNISATTGSNNLGYIEQHREEFKEIFEKIIDFSEKYILKNKVNSNLKSSFDEQFAVSDSILLSNSFVSLLKYTSFGASGGFTFLDLDVKQGRLRYQTVTEVLDATLIYQSITGLYETRTDLSQLGGDSGGSKRTADGSEFESPKKKRKV

SEQ ID NO: 382 - protein, 1513 aa, Artificial Sequence
  dScCasFok, HNHdelta with longer positively charged linker, SV40+bipartiteSV40 NLS (TG14301)
  misc_feature: synthetic
MAVTPKKKRKVGGSGSQLVKSELEEKKSELRHKLKYVPHEYIELIEIARNSTQDRILEMKVMEFFMKVYGYRGKHLGGSRKPDGAIYTVGSPIDYGVIVDTKAYSGGYNLPIGQADEMQRYVEENQTRNKHINPNEWWKVYPSSVTEFKFLFVSGHFKGNYKAQLTRLNHITNCNGAVLSVEELLIGGEMIKAGTLTLEEVRRKFNNGEINFSGSETPGTSESATPESMEKKYSIGLAIGTNSVGWAVITDDYKVPSKKFKVLGNTNRKSIKKNLMGALLFDSGETAEATRLKRTARRRYTRRKNRIRYLQEIFANEMAKLDDSFFQRLEESFLVEEDKKNERHPIFGNLADEVAYHRNYPTIYHLRKKLADSPEKADLRLIYLALAHIIKFRGHFLIEGKLNAENSDVAKLFYQLIQTYNQLFEESPLDEIEVDAKGILSARLSKSKRLEKLIAVFPNEKKNGLFGNIIALALGLTPNFKSNFDLTEDAKLQLSKDTYDDDLDELLGQIGDQYADLFSAAKNLSDAILLSDILRSNSEVTKAPLSASMVKRYDEHHQDLALLKTLVRQQFPEKYAEIFKDDTKNGYAGYVGIGIKHRKRTTKLATQEEFYKFIKPILEKMDGAEELLAKLNRDDLLRKQRTFDNGSIPHQIHLKELHAILRRQEEFYPFLKENREKIEKILTFRIPYYVGPLARGNSRFAWLTRKSEEAITPWNFEEVVDKGASAQSFIERMTNFDEQLPNKKVLPKHSLLYEYFTVYNELTKVKYVTERMRKPEFLSGEQKKAIVDLLFKTNRKVTVKQLKEDYFKKIECFDSVEIIGVEDRFNASLGTYHDLLKIIKDKDFLDNEENEDILEDIVLTLTLFEDREMIEERLKTYAHLFDDKVMKQLKRRHYTGWGRLSRKMINGIRDKQSGKTILDFLKSDGFSNRNFMQLIHDDSLTFKEEIEKAQVSGQGDSLHEQIADLAGSPAIKKGILQTVKIVDELVKVMGHKPENIVIEMARENQTTTKGLQQSRERKKRGGKARGKGGSGGLSEADKAGFIKRQLVETRQITKHVARILDSRMNTKRDKNDKPIREVKVITLKSKLVSDFRKDFQLYKVRDINNYHHAHDAYLNAVVGTALIKKYPKLESEFVYGDYKVYDVRKMIAKSEQEIGKATAKRFFYSNIMNFFKTEVKLANGEIRKRPLIETNGETGEVVWNKEKDFATVRKVLAMPQVNIVKKTEVQTGGFSKESILSKRESAKLIPRKKGWDTRKYGGFGSPTVAYSILVVAKVEKGKAKKLKSVKVLVGITIMEKGSYEKDPIGFLEAKGYKDIKKELIFKLPKYSLFELENGRRRMLASATELQKANELVLPQHLVRLLYYTQNISATTGSNNLGYIEQHREEFKEIFEKIIDFSEKYILKNKVNSNLKSSFDEQFAVSDSILLSNSFVSLLKYTSFGASGGFTFLDLDVKQGRLRYQTVTEVLDATLIYQSITGLYETRTDLSQLGGDSGGSKRTADGSEFESPKKKRKV

SEQ ID NO: 383 - protein, 1506 aa, Artificial Sequence
  dScCasFok, HNHdelta with shorter positively charged linker, SV40+bipartiteSV40 NLS (14302)
  misc_feature: synthetic
MAVTPKKKRKVGGSGSQLVKSELEEKKSELRHKLKYVPHEYIELIEIARNSTQDRILEMKVMEFFMKVYGYRGKHLGGSRKPDGAIYTVGSPIDYGVIVDTKAYSGGYNLPIGQADEMQRYVEENQTRNKHINPNEWWKVYPSSVTEFKFLFVSGHFKGNYKAQLTRLNHITNCNGAVLSVEELLIGGEMIKAGTLTLEEVRRKFNNGEINFSGSETPGTSESATPESMEKKYSIGLAIGTNSVGWAVITDDYKVPSKKFKVLGNTNRKSIKKNLMGALLFDSGETAEATRLKRTARRRYTRRKNRIRYLQEIFANEMAKLDDSFFQRLEESFLVEEDKKNERHPIFGNLADEVAYHRNYPTIYHLRKKLADSPEKADLRLIYLALAHIIKFRGHFLIEGKLNAENSDVAKLFYQLIQTYNQLFEESPLDEIEVDAKGILSARLSKSKRLEKLIAVFPNEKKNGLFGNIIALALGLTPNFKSNFDLTEDAKLQLSKDTYDDDLDELLGQIGDQYADLFSAAKNLSDAILLSDILRSNSEVTKAPLSASMVKRYDEHHQDLALLKTLVRQQFPEKYAEIFKDDTKNGYAGYVGIGIKHRKRTTKLATQEEFYKFIKPILEKMDGAEELLAKLNRDDLLRKQRTFDNGSIPHQIHLKELHAILRRQEEFYPFLKENREKIEKILTFRIPYYVGPLARGNSRFAWLTRKSEEAITPWNFEEVVDKGASAQSFIERMTNFDEQLPNKKVLPKHSLLYEYFTVYNELTKVKYVTERMRKPEFLSGEQKKAIVDLLFKTNRKVTVKQLKEDYFKKIECFDSVEIIGVEDRFNASLGTYHDLLKIIKDKDFLDNEENEDILEDIVLTLTLFEDREMIEERLKTYAHLFDDKVMKQLKRRHYTGWGRLSRKMINGIRDKQSGKTILDFLKSDGFSNRNFMQLIHDDSLTFKEEIEKAQVSGQGDSLHEQIADLAGSPAIKKGILQTVKIVDELVKVMGHKPENIVIEMARENQTTTKGLQQSRERKKRGKSKGLSEADKAGFIKRQLVETRQITKHVARILDSRMNTKRDKNDKPIREVKVITLKSKLVSDFRKDFQLYKVRDINNYHHAHDAYLNAVVGTALIKKYPKLESEFVYGDYKVYDVRKMIAKSEQEIGKATAKRFFYSNIMNFFKTEVKLANGEIRKRPLIETNGETGEVVWNKEKDFATVRKVLAMPQVNIVKKTEVQTGGFSKESILSKRESAKLIPRKKGWDTRKYGGFGSPTVAYSILVVAKVEKGKAKKLKSVKVLVGITIMEKGSYEKDPIGFLEAKGYKDIKKELIFKLPKYSLFELENGRRRMLASATELQKANELVLPQHLVRLLYYTQNISATTGSNNLGYIEQHREEFKEIFEKIIDFSEKYILKNKVNSNLKSSFDEQFAVSDSILLSNSFVSLLKYTSFGASGGFTFLDLDVKQGRLRYQTVTEVLDATLIYQSITGLYETRTDLSQLGGDSGGSKRTADGSEFESPKKKRKV

SEQ ID NO: 384 - protein, 1580 aa, Artificial Sequence
  dScCasFok, HNH replaced with StkC, SV40+bipartiteSV40 NLS (TG14303)
  misc_feature: synthetic
MAVTPKKKRKVGGSGSQLVKSELEEKKSELRHKLKYVPHEYIELIEIARNSTQDRILEMKVMEFFMKVYGYRGKHLGGSRKPDGAIYTVGSPIDYGVIVDTKAYSGGYNLPIGQADEMQRYVEENQTRNKHINPNEWWKVYPSSVTEFKFLFVSGHFKGNYKAQLTRLNHITNCNGAVLSVEELLIGGEMIKAGTLTLEEVRRKFNNGEINFSGSETPGTSESATPESMEKKYSIGLAIGTNSVGWAVITDDYKVPSKKFKVLGNTNRKSIKKNLMGALLFDSGETAEATRLKRTARRRYTRRKNRIRYLQEIFANEMAKLDDSFFQRLEESFLVEEDKKNERHPIFGNLADEVAYHRNYPTIYHLRKKLADSPEKADLRLIYLALAHIIKFRGHFLIEGKLNAENSDVAKLFYQLIQTYNQLFEESPLDEIEVDAKGILSARLSKSKRLEKLIAVFPNEKKNGLFGNIIALALGLTPNFKSNFDLTEDAKLQLSKDTYDDDLDELLGQIGDQYADLFSAAKNLSDAILLSDILRSNSEVTKAPLSASMVKRYDEHHQDLALLKTLVRQQFPEKYAEIFKDDTKNGYAGYVGIGIKHRKRTTKLATQEEFYKFIKPILEKMDGAEELLAKLNRDDLLRKQRTFDNGSIPHQIHLKELHAILRRQEEFYPFLKENREKIEKILTFRIPYYVGPLARGNSRFAWLTRKSEEAITPWNFEEVVDKGASAQSFIERMTNFDEQLPNKKVLPKHSLLYEYFTVYNELTKVKYVTERMRKPEFLSGEQKKAIVDLLFKTNRKVTVKQLKEDYFKKIECFDSVEIIGVEDRFNASLGTYHDLLKIIKDKDFLDNEENEDILEDIVLTLTLFEDREMIEERLKTYAHLFDDKVMKQLKRRHYTGWGRLSRKMINGIRDKQSGKTILDFLKSDGFSNRNFMQLIHDDSLTFKEEIEKAQVSGQGDSLHEQIADLAGSPAIKKGILQTVKIVDELVKVMGHKPENIVIEMARENQTTTKGLQQSRERKKRGGSSVSMVHSERLPLLMNRNGIRFQSEVIDPNPPKKVKWVLTGSGGNMFTANVRGSNVSSLVKHTWSEAFVSLIEDRGGLSEADKAGFIKRQLVETRQITKHVARILDSRMNTKRDKNDKPIREVKVITLKSKLVSDFRKDFQLYKVRDINNYHHAHDAYLNAVVGTALIKKYPKLESEFVYGDYKVYDVRKMIAKSEQEIGKATAKRFFYSNIMNFFKTEVKLANGEIRKRPLIETNGETGEVVWNKEKDFATVRKVLAMPQVNIVKKTEVQTGGFSKESILSKRESAKLIPRKKGWDTRKYGGFGSPTVAYSILVVAKVEKGKAKKLKSVKVLVGITIMEKGSYEKDPIGFLEAKGYKDIKKELIFKLPKYSLFELENGRRRMLASATELQKANELVLPQHLVRLLYYTQNISATTGSNNLGYIEQHREEFKEIFEKIIDFSEKYILKNKVNSNLKSSFDEQFAVSDSILLSNSFVSLLKYTSFGASGGFTFLDLDVKQGRLRYQTVTEVLDATLIYQSITGLYETRTDLSQLGGDSGGSKRTADGSEFESPKKKRKV

SEQ ID NO: 385 - protein, 1499 aa, Artificial Sequence
  dScCasFok, HNHdelta with HNS linker, SV40+bipartiteSV40 NLS (TG14304)
  misc_feature: synthetic
MAVTPKKKRKVGGSGSQLVKSELEEKKSELRHKLKYVPHEYIELIEIARNSTQDRILEMKVMEFFMKVYGYRGKHLGGSRKPDGAIYTVGSPIDYGVIVDTKAYSGGYNLPIGQADEMQRYVEENQTRNKHINPNEWWKVYPSSVTEFKFLFVSGHFKGNYKAQLTRLNHITNCNGAVLSVEELLIGGEMIKAGTLTLEEVRRKFNNGEINFSGSETPGTSESATPESMEKKYSIGLAIGTNSVGWAVITDDYKVPSKKFKVLGNTNRKSIKKNLMGALLFDSGETAEATRLKRTARRRYTRRKNRIRYLQEIFANEMAKLDDSFFQRLEESFLVEEDKKNERHPIFGNLADEVAYHRNYPTIYHLRKKLADSPEKADLRLIYLALAHIIKFRGHFLIEGKLNAENSDVAKLFYQLIQTYNQLFEESPLDEIEVDAKGILSARLSKSKRLEKLIAVFPNEKKNGLFGNIIALALGLTPNFKSNFDLTEDAKLQLSKDTYDDDLDELLGQIGDQYADLFSAAKNLSDAILLSDILRSNSEVTKAPLSASMVKRYDEHHQDLALLKTLVRQQFPEKYAEIFKDDTKNGYAGYVGIGIKHRKRTTKLATQEEFYKFIKPILEKMDGAEELLAKLNRDDLLRKQRTFDNGSIPHQIHLKELHAILRRQEEFYPFLKENREKIEKILTFRIPYYVGPLARGNSRFAWLTRKSEEAITPWNFEEVVDKGASAQSFIERMTNFDEQLPNKKVLPKHSLLYEYFTVYNELTKVKYVTERMRKPEFLSGEQKKAIVDLLFKTNRKVTVKQLKEDYFKKIECFDSVEIIGVEDRFNASLGTYHDLLKIIKDKDFLDNEENEDILEDIVLTLTLFEDREMIEERLKTYAHLFDDKVMKQLKRRHYTGWGRLSRKMINGIRDKQSGKTILDFLKSDGFSNRNFMQLIHDDSLTFKEEIEKAQVSGQGDSLHEQIADLAGSPAIKKGILQTVKIVDELVKVMGHKPENIVIEMARAAVKSGTKAKRAQRPGLSEADKAGFIKRQLVETRQITKHVARILDSRMNTKRDKNDKPIREVKVITLKSKLVSDFRKDFQLYKVRDINNYHHAHDAYLNAVVGTALIKKYPKLESEFVYGDYKVYDVRKMIAKSEQEIGKATAKRFFYSNIMNFFKTEVKLANGEIRKRPLIETNGETGEVVWNKEKDFATVRKVLAMPQVNIVKKTEVQTGGFSKESILSKRESAKLIPRKKGWDTRKYGGFGSPTVAYSILVVAKVEKGKAKKLKSVKVLVGITIMEKGSYEKDPIGFLEAKGYKDIKKELIFKLPKYSLFELENGRRRMLASATELQKANELVLPQHLVRLLYYTQNISATTGSNNLGYIEQHREEFKEIFEKIIDFSEKYILKNKVNSNLKSSFDEQFAVSDSILLSNSFVSLLKYTSFGASGGFTFLDLDVKQGRLRYQTVTEVLDATLIYQSITGLYETRTDLSQLGGDSGGSKRTADGSEFESPKKKRKV

SEQ ID NO: 386 - protein, 1506 aa, Artificial Sequence
  dScCasFok, ancestral RuvC+Rec1/2, HNHdelta, SV40+bipartiteSV40 NLS (14315)
  misc_feature: synthetic
MAVTPKKKRKVGGSGSQLVKSELEEKKSELRHKLKYVPHEYIELIEIARNSTQDRILEMKVMEFFMKVYGYRGKHLGGSRKPDGAIYTVGSPIDYGVIVDTKAYSGGYNLPIGQADEMQRYVEENQTRNKHINPNEWWKVYPSSVTEFKFLFVSGHFKGNYKAQLTRLNHITNCNGAVLSVEELLIGGEMIKAGTLTLEEVRRKFNNGEINFSGSETPGTSESATPESMEKKYSIGLAIGTNSVGWAVITDDYKVPSKKFKVLGNTNRKSIKKNLMGALLFDSGETAEATRLKRTARRRYTRRKNRIRYLQEIFANEMAKLDDSFFQRLEESFLVEEDKKNERHPIFGNLADEVAYHRNYPTIYHLRKKLADSPEKADLRLIYLALAHIIKFRGHFLIEGKLNAENSDVAKLFYQLIQTYNQLFEESPLDEIEVDAKGILSARLSKSKRLEKLIAVFPNEKKNGLFGNIIALALGLTPNFKSNFDLTEDAKLQLSKDTYDDDLDELLGQIGDQYADLFSAAKNLSDAILLSDILRSNSEVTKAPLSASMVKRYDEHHQDLALLKTLVRQQLPEKYKEIFSDQSKNGYAGYIDIGIKHRKRTTKRTSQEEFYKFIKPILEKMDGAEELLAKLNREDLLRKQRTFDNGSIPHQIHLGELHAILRRQEEFYPFLKDNREKIEKILTFRIPYYVGPLARGNSRFAWMTRKSDEAITPWNFEEVVDKGASAQSFIERMTNFDEYLPNKKVLPKHSLLYEYFTVYNELTKVKYVTEGMRKPEFLSGEQKEAIVDLLFKTNRKVTVKQLKEDYFKKIECFDSVEIIGVEDRFNASLGTYHDLLKIIKDKDFLDNEENEDILEDIVLTLTLFEDREMIEERLKKYANLFDDKVMKQLKRRHYTGWGRLSRKMINGIRDKQSGKTILDFLKSDGFSNRNFMQLIHDDSLTFKEEIEKAQVSGQGDSLHEQIADLAGSPAIKKGILQTVKIVDELVKVMGHKPENIVIEMARENQTTTKGLQQSRERKKRGGSGGLSEADKAGFIKRQLVETRQITKHVARILDSRMNTKRDKNDKPIREVKVITLKSKLVSDFRKDFQLYKVRDINNYHHAHDAYLNAVVGTALIKKYPKLESEFVYGDYKVYDVRKMIAKSEQEIGKATAKRFFYSNIMNFFKTEVKLANGEIRKRPLIETNGETGEVVWNKEKDFATVRKVLAMPQVNIVKKTEVQTGGFSKESILSKRESAKLIPRKKGWDTRKYGGFGSPTVAYSILVVAKVEKGKAKKLKSVKVLVGITIMEKGSYEKDPIGFLEAKGYKDIKKELIFKLPKYSLFELENGRRRMLASATELQKANELVLPQHLVRLLYYTQNISATTGSNNLGYIEQHREEFKEIFEKIIDFSEKYILKNKVNSNLKSSFDEQFAVSDSILLSNSFVSLLKYTSFGASGGFTFLDLDVKQGRLRYQTVTEVLDATLIYQSITGLYETRTDLSQLGGDSGGSKRTADGSEFESPKKKRKV

SEQ ID NO: 387 - protein, 1513 aa, Artificial Sequence
  dScCasFok, ancestral RuvC+Rec1/2, HNHdelta with longer linker, SV40+bipartiteSV40 NLS (TG14316)
  misc_feature: synthetic
MAVTPKKKRKVGGSGSQLVKSELEEKKSELRHKLKYVPHEYIELIEIARNSTQDRILEMKVMEFFMKVYGYRGKHLGGSRKPDGAIYTVGSPIDYGVIVDTKAYSGGYNLPIGQADEMQRYVEENQTRNKHINPNEWWKVYPSSVTEFKFLFVSGHFKGNYKAQLTRLNHITNCNGAVLSVEELLIGGEMIKAGTLTLEEVRRKFNNGEINFSGSETPGTSESATPESMEKKYSIGLAIGTNSVGWAVITDDYKVPSKKFKVLGNTNRKSIKKNLMGALLFDSGETAEATRLKRTARRRYTRRKNRIRYLQEIFANEMAKLDDSFFQRLEESFLVEEDKKNERHPIFGNLADEVAYHRNYPTIYHLRKKLADSPEKADLRLIYLALAHIIKFRGHFLIEGKLNAENSDVAKLFYQLIQTYNQLFEESPLDEIEVDAKGILSARLSKSKRLEKLIAVFPNEKKNGLFGNIIALALGLTPNFKSNFDLTEDAKLQLSKDTYDDDLDELLGQIGDQYADLFSAAKNLSDAILLSDILRSNSEVTKAPLSASMVKRYDEHHQDLALLKTLVRQQLPEKYKEIFSDQSKNGYAGYIDIGIKHRKRTTKRTSQEEFYKFIKPILEKMDGAEELLAKLNREDLLRKQRTFDNGSIPHQIHLGELHAILRRQEEFYPFLKDNREKIEKILTFRIPYYVGPLARGNSRFAWMTRKSDEAITPWNFEEVVDKGASAQSFIERMTNFDEYLPNKKVLPKHSLLYEYFTVYNELTKVKYVTEGMRKPEFLSGEQKEAIVDLLFKTNRKVTVKQLKEDYFKKIECFDSVEIIGVEDRFNASLGTYHDLLKIIKDKDFLDNEENEDILEDIVLTLTLFEDREMIEERLKKYANLFDDKVMKQLKRRHYTGWGRLSRKMINGIRDKQSGKTILDFLKSDGFSNRNFMQLIHDDSLTFKEEIEKAQVSGQGDSLHEQIADLAGSPAIKKGILQTVKIVDELVKVMGHKPENIVIEMARENQTTTKGLQQSRERKKRGGSAGGTGGSGGLSEADKAGFIKRQLVETRQITKHVARILDSRMNTKRDKNDKPIREVKVITLKSKLVSDFRKDFQLYKVRDINNYHHAHDAYLNAVVGTALIKKYPKLESEFVYGDYKVYDVRKMIAKSEQEIGKATAKRFFYSNIMNFFKTEVKLANGEIRKRPLIETNGETGEVVWNKEKDFATVRKVLAMPQVNIVKKTEVQTGGFSKESILSKRESAKLIPRKKGWDTRKYGGFGSPTVAYSILVVAKVEKGKAKKLKSVKVLVGITIMEKGSYEKDPIGFLEAKGYKDIKKELIFKLPKYSLFELENGRRRMLASATELQKANELVLPQHLVRLLYYTQNISATTGSNNLGYIEQHREEFKEIFEKIIDFSEKYILKNKVNSNLKSSFDEQFAVSDSILLSNSFVSLLKYTSFGASGGFTFLDLDVKQGRLRYQTVTEVLDATLIYQSITGLYETRTDLSQLGGDSGGSKRTADGSEFESPKKKRKV

SEQ ID NO: 388 - protein, 1616 aa, Artificial Sequence
  dScCasFok, ancestral RuvC+Rec1/2, HNH replaced with SSB, SV40+bipartiteSV40 NLS (TG14317)
  misc_feature: synthetic
MAVTPKKKRKVGGSGSQLVKSELEEKKSELRHKLKYVPHEYIELIEIARNSTQDRILEMKVMEFFMKVYGYRGKHLGGSRKPDGAIYTVGSPIDYGVIVDTKAYSGGYNLPIGQADEMQRYVEENQTRNKHINPNEWWKVYPSSVTEFKFLFVSGHFKGNYKAQLTRLNHITNCNGAVLSVEELLIGGEMIKAGTLTLEEVRRKFNNGEINFSGSETPGTSESATPESMEKKYSIGLAIGTNSVGWAVITDDYKVPSKKFKVLGNTNRKSIKKNLMGALLFDSGETAEATRLKRTARRRYTRRKNRIRYLQEIFANEMAKLDDSFFQRLEESFLVEEDKKNERHPIFGNLADEVAYHRNYPTIYHLRKKLADSPEKADLRLIYLALAHIIKFRGHFLIEGKLNAENSDVAKLFYQLIQTYNQLFEESPLDEIEVDAKGILSARLSKSKRLEKLIAVFPNEKKNGLFGNIIALALGLTPNFKSNFDLTEDAKLQLSKDTYDDDLDELLGQIGDQYADLFSAAKNLSDAILLSDILRSNSEVTKAPLSASMVKRYDEHHQDLALLKTLVRQQLPEKYKEIFSDQSKNGYAGYIDIGIKHRKRTTKRTSQEEFYKFIKPILEKMDGAEELLAKLNREDLLRKQRTFDNGSIPHQIHLGELHAILRRQEEFYPFLKDNREKIEKILTFRIPYYVGPLARGNSRFAWMTRKSDEAITPWNFEEVVDKGASAQSFIERMTNFDEYLPNKKVLPKHSLLYEYFTVYNELTKVKYVTEGMRKPEFLSGEQKEAIVDLLFKTNRKVTVKQLKEDYFKKIECFDSVEIIGVEDRFNASLGTYHDLLKIIKDKDFLDNEENEDILEDIVLTLTLFEDREMIEERLKKYANLFDDKVMKQLKRRHYTGWGRLSRKMINGIRDKQSGKTILDFLKSDGFSNRNFMQLIHDDSLTFKEEIEKAQVSGQGDSLHEQIADLAGSPAIKKGILQTVKIVDELVKVMGHKPENIVIEMARENQTTTKGLQQSRERKKRGGSTTETFVKDIKPGLKNLNLIFIVLETGRVTKTKDGHEVRTCKVADKTGSINISVWDDVGNLIQPGDIIRLTKGYASVFKGCLTLYTGRGGDLQKIGEFCMVYSEVPNFSEPGGLSEADKAGFIKRQLVETRQITKHVARILDSRMNTKRDKNDKPIREVKVITLKSKLVSDFRKDFQLYKVRDINNYHHAHDAYLNAVVGTALIKKYPKLESEFVYGDYKVYDVRKMIAKSEQEIGKATAKRFFYSNIMNFFKTEVKLANGEIRKRPLIETNGETGEVVWNKEKDFATVRKVLAMPQVNIVKKTEVQTGGFSKESILSKRESAKLIPRKKGWDTRKYGGFGSPTVAYSILVVAKVEKGKAKKLKSVKVLVGITIMEKGSYEKDPIGFLEAKGYKDIKKELIFKLPKYSLFELENGRRRMLASATELQKANELVLPQHLVRLLYYTQNISATTGSNNLGYIEQHREEFKEIFEKIIDFSEKYILKNKVNSNLKSSFDEQFAVSDSILLSNSFVSLLKYTSFGASGGFTFLDLDVKQGRLRYQTVTEVLDATLIYQSITGLYETRTDLSQLGGDSGGSKRTADGSEFESPKKKRKV

SEQ ID NO: 389 - protein, 1488 aa, Artificial Sequence
  dScCasFok, ancestral RuvC+Rec1/2, HNHdelta with longer deletion SV40+bipartiteSV40 NLS (TG14318)
  misc_feature: synthetic
MAVTPKKKRKVGGSGSQLVKSELEEKKSELRHKLKYVPHEYIELIEIARNSTQDRILEMKVMEFFMKVYGYRGKHLGGSRKPDGAIYTVGSPIDYGVIVDTKAYSGGYNLPIGQADEMQRYVEENQTRNKHINPNEWWKVYPSSVTEFKFLFVSGHFKGNYKAQLTRLNHITNCNGAVLSVEELLIGGEMIKAGTLTLEEVRRKFNNGEINFSGSETPGTSESATPESMEKKYSIGLAIGTNSVGWAVITDDYKVPSKKFKVLGNTNRKSIKKNLMGALLFDSGETAEATRLKRTARRRYTRRKNRIRYLQEIFANEMAKLDDSFFQRLEESFLVEEDKKNERHPIFGNLADEVAYHRNYPTIYHLRKKLADSPEKADLRLIYLALAHIIKFRGHFLIEGKLNAENSDVAKLFYQLIQTYNQLFEESPLDEIEVDAKGILSARLSKSKRLEKLIAVFPNEKKNGLFGNIIALALGLTPNFKSNFDLTEDAKLQLSKDTYDDDLDELLGQIGDQYADLFSAAKNLSDAILLSDILRSNSEVTKAPLSASMVKRYDEHHQDLALLKTLVRQQLPEKYKEIFSDQSKNGYAGYIDIGIKHRKRTTKRTSQEEFYKFIKPILEKMDGAEELLAKLNREDLLRKQRTFDNGSIPHQIHLGELHAILRRQEEFYPFLKDNREKIEKILTFRIPYYVGPLARGNSRFAWMTRKSDEAITPWNFEEVVDKGASAQSFIERMTNFDEYLPNKKVLPKHSLLYEYFTVYNELTKVKYVTEGMRKPEFLSGEQKEAIVDLLFKTNRKVTVKQLKEDYFKKIECFDSVEIIGVEDRFNASLGTYHDLLKIIKDKDFLDNEENEDILEDIVLTLTLFEDREMIEERLKKYANLFDDKVMKQLKRRHYTGWGRLSRKMINGIRDKQSGKTILDFLKSDGFSNRNFMQLIHDDSLTFKEEIEKAQVSGQGDSLHEQIADLAGSPAIKKGILQTVKIVDELVKVMGHKPENIVIEMARGGSGGLSEADKAGFIKRQLVETRQITKHVARILDSRMNTKRDKNDKPIREVKVITLKSKLVSDFRKDFQLYKVRDINNYHHAHDAYLNAVVGTALIKKYPKLESEFVYGDYKVYDVRKMIAKSEQEIGKATAKRFFYSNIMNFFKTEVKLANGEIRKRPLIETNGETGEVVWNKEKDFATVRKVLAMPQVNIVKKTEVQTGGFSKESILSKRESAKLIPRKKGWDTRKYGGFGSPTVAYSILVVAKVEKGKAKKLKSVKVLVGITIMEKGSYEKDPIGFLEAKGYKDIKKELIFKLPKYSLFELENGRRRMLASATELQKANELVLPQHLVRLLYYTQNISATTGSNNLGYIEQHREEFKEIFEKIIDFSEKYILKNKVNSNLKSSFDEQFAVSDSILLSNSFVSLLKYTSFGASGGFTFLDLDVKQGRLRYQTVTEVLDATLIYQSITGLYETRTDLSQLGGDSGGSKRTADGSEFESPKKKRKV

SEQ ID NO: 390 - protein, 1513 aa, Artificial Sequence
  dScCasFok, ancestral RuvC+Rec1/2, HNHdelta with longer positively charged linker, SV40+bipartiteSV40 NLS (TG14319)
  misc_feature: synthetic
MAVTPKKKRKVGGSGSQLVKSELEEKKSELRHKLKYVPHEYIELIEIARNSTQDRILEMKVMEFFMKVYGYRGKHLGGSRKPDGAIYTVGSPIDYGVIVDTKAYSGGYNLPIGQADEMQRYVEENQTRNKHINPNEWWKVYPSSVTEFKFLFVSGHFKGNYKAQLTRLNHITNCNGAVLSVEELLIGGEMIKAGTLTLEEVRRKFNNGEINFSGSETPGTSESATPESMEKKYSIGLAIGTNSVGWAVITDDYKVPSKKFKVLGNTNRKSIKKNLMGALLFDSGETAEATRLKRTARRRYTRRKNRIRYLQEIFANEMAKLDDSFFQRLEESFLVEEDKKNERHPIFGNLADEVAYHRNYPTIYHLRKKLADSPEKADLRLIYLALAHIIKFRGHFLIEGKLNAENSDVAKLFYQLIQTYNQLFEESPLDEIEVDAKGILSARLSKSKRLEKLIAVFPNEKKNGLFGNIIALALGLTPNFKSNFDLTEDAKLQLSKDTYDDDLDELLGQIGDQYADLFSAAKNLSDAILLSDILRSNSEVTKAPLSASMVKRYDEHHQDLALLKTLVRQQLPEKYKEIFSDQSKNGYAGYIDIGIKHRKRTTKRTSQEEFYKFIKPILEKMDGAEELLAKLNREDLLRKQRTFDNGSIPHQIHLGELHAILRRQEEFYPFLKDNREKIEKILTFRIPYYVGPLARGNSRFAWMTRKSDEAITPWNFEEVVDKGASAQSFIERMTNFDEYLPNKKVLPKHSLLYEYFTVYNELTKVKYVTEGMRKPEFLSGEQKEAIVDLLFKTNRKVTVKQLKEDYFKKIECFDSVEIIGVEDRFNASLGTYHDLLKIIKDKDFLDNEENEDILEDIVLTLTLFEDREMIEERLKKYANLFDDKVMKQLKRRHYTGWGRLSRKMINGIRDKQSGKTILDFLKSDGFSNRNFMQLIHDDSLTFKEEIEKAQVSGQGDSLHEQIADLAGSPAIKKGILQTVKIVDELVKVMGHKPENIVIEMARENQTTTKGLQQSRERKKRGGKARGKGGSGGLSEADKAGFIKRQLVETRQITKHVARILDSRMNTKRDKNDKPIREVKVITLKSKLVSDFRKDFQLYKVRDINNYHHAHDAYLNAVVGTALIKKYPKLESEFVYGDYKVYDVRKMIAKSEQEIGKATAKRFFYSNIMNFFKTEVKLANGEIRKRPLIETNGETGEVVWNKEKDFATVRKVLAMPQVNIVKKTEVQTGGFSKESILSKRESAKLIPRKKGWDTRKYGGFGSPTVAYSILVVAKVEKGKAKKLKSVKVLVGITIMEKGSYEKDPIGFLEAKGYKDIKKELIFKLPKYSLFELENGRRRMLASATELQKANELVLPQHLVRLLYYTQNISATTGSNNLGYIEQHREEFKEIFEKIIDFSEKYILKNKVNSNLKSSFDEQFAVSDSILLSNSFVSLLKYTSFGASGGFTFLDLDVKQGRLRYQTVTEVLDATLIYQSITGLYETRTDLSQLGGDSGGSKRTADGSEFESPKKKRKV

SEQ ID NO: 391 - protein, 1506 aa, Artificial Sequence
  dScCasFok, ancestral RuvC+Rec1/2, HNHdelta with shorter positively charged linker, SV40+bipartiteSV40 NLS (TG14320)
  misc_feature: synthetic
MAVTPKKKRKVGGSGSQLVKSELEEKKSELRHKLKYVPHEYIELIEIARNSTQDRILEMKVMEFFMKVYGYRGKHLGGSRKPDGAIYTVGSPIDYGVIVDTKAYSGGYNLPIGQADEMQRYVEENQTRNKHINPNEWWKVYPSSVTEFKFLFVSGHFKGNYKAQLTRLNHITNCNGAVLSVEELLIGGEMIKAGTLTLEEVRRKFNNGEINFSGSETPGTSESATPESMEKKYSIGLAIGTNSVGWAVITDDYKVPSKKFKVLGNTNRKSIKKNLMGALLFDSGETAEATRLKRTARRRYTRRKNRIRYLQEIFANEMAKLDDSFFQRLEESFLVEEDKKNERHPIFGNLADEVAYHRNYPTIYHLRKKLADSPEKADLRLIYLALAHIIKFRGHFLIEGKLNAENSDVAKLFYQLIQTYNQLFEESPLDEIEVDAKGILSARLSKSKRLEKLIAVFPNEKKNGLFGNIIALALGLTPNFKSNFDLTEDAKLQLSKDTYDDDLDELLGQIGDQYADLFSAAKNLSDAILLSDILRSNSEVTKAPLSASMVKRYDEHHQDLALLKTLVRQQLPEKYKEIFSDQSKNGYAGYIDIGIKHRKRTTKRTSQEEFYKFIKPILEKMDGAEELLAKLNREDLLRKQRTFDNGSIPHQIHLGELHAILRRQEEFYPFLKDNREKIEKILTFRIPYYVGPLARGNSRFAWMTRKSDEAITPWNFEEVVDKGASAQSFIERMTNFDEYLPNKKVLPKHSLLYEYFTVYNELTKVKYVTEGMRKPEFLSGEQKEAIVDLLFKTNRKVTVKQLKEDYFKKIECFDSVEIIGVEDRFNASLGTYHDLLKIIKDKDFLDNEENEDILEDIVLTLTLFEDREMIEERLKKYANLFDDKVMKQLKRRHYTGWGRLSRKMINGIRDKQSGKTILDFLKSDGFSNRNFMQLIHDDSLTFKEEIEKAQVSGQGDSLHEQIADLAGSPAIKKGILQTVKIVDELVKVMGHKPENIVIEMARENQTTTKGLQQSRERKKRGKSKGLSEADKAGFIKRQLVETRQITKHVARILDSRMNTKRDKNDKPIREVKVITLKSKLVSDFRKDFQLYKVRDINNYHHAHDAYLNAVVGTALIKKYPKLESEFVYGDYKVYDVRKMIAKSEQEIGKATAKRFFYSNIMNFFKTEVKLANGEIRKRPLIETNGETGEVVWNKEKDFATVRKVLAMPQVNIVKKTEVQTGGFSKESILSKRESAKLIPRKKGWDTRKYGGFGSPTVAYSILVVAKVEKGKAKKLKSVKVLVGITIMEKGSYEKDPIGFLEAKGYKDIKKELIFKLPKYSLFELENGRRRMLASATELQKANELVLPQHLVRLLYYTQNISATTGSNNLGYIEQHREEFKEIFEKIIDFSEKYILKNKVNSNLKSSFDEQFAVSDSILLSNSFVSLLKYTSFGASGGFTFLDLDVKQGRLRYQTVTEVLDATLIYQSITGLYETRTDLSQLGGDSGGSKRTADGSEFESPKKKRKV

SEQ ID NO: 392 - protein, 1580 aa, Artificial Sequence
  dScCasFok, ancestral RuvC+Rec1/2, HNH replaced with StkC, SV40+bipartiteSV40 NLS (TG14321)
  misc_feature: synthetic
MAVTPKKKRKVGGSGSQLVKSELEEKKSELRHKLKYVPHEYIELIEIARNSTQDRILEMKVMEFFMKVYGYRGKHLGGSRKPDGAIYTVGSPIDYGVIVDTKAYSGGYNLPIGQADEMQRYVEENQTRNKHINPNEWWKVYPSSVTEFKFLFVSGHFKGNYKAQLTRLNHITNCNGAVLSVEELLIGGEMIKAGTLTLEEVRRKFNNGEINFSGSETPGTSESATPESMEKKYSIGLAIGTNSVGWAVITDDYKVPSKKFKVLGNTNRKSIKKNLMGALLFDSGETAEATRLKRTARRRYTRRKNRIRYLQEIFANEMAKLDDSFFQRLEESFLVEEDKKNERHPIFGNLADEVAYHRNYPTIYHLRKKLADSPEKADLRLIYLALAHIIKFRGHFLIEGKLNAENSDVAKLFYQLIQTYNQLFEESPLDEIEVDAKGILSARLSKSKRLEKLIAVFPNEKKNGLFGNIIALALGLTPNFKSNFDLTEDAKLQLSKDTYDDDLDELLGQIGDQYADLFSAAKNLSDAILLSDILRSNSEVTKAPLSASMVKRYDEHHQDLALLKTLVRQQLPEKYKEIFSDQSKNGYAGYIDIGIKHRKRTTKRTSQEEFYKFIKPILEKMDGAEELLAKLNREDLLRKQRTFDNGSIPHQIHLGELHAILRRQEEFYPFLKDNREKIEKILTFRIPYYVGPLARGNSRFAWMTRKSDEAITPWNFEEVVDKGASAQSFIERMTNFDEYLPNKKVLPKHSLLYEYFTVYNELTKVKYVTEGMRKPEFLSGEQKEAIVDLLFKTNRKVTVKQLKEDYFKKIECFDSVEIIGVEDRFNASLGTYHDLLKIIKDKDFLDNEENEDILEDIVLTLTLFEDREMIEERLKKYANLFDDKVMKQLKRRHYTGWGRLSRKMINGIRDKQSGKTILDFLKSDGFSNRNFMQLIHDDSLTFKEEIEKAQVSGQGDSLHEQIADLAGSPAIKKGILQTVKIVDELVKVMGHKPENIVIEMARENQTTTKGLQQSRERKKRGGSSVSMVHSERLPLLMNRNGIRFQSEVIDPNPPKKVKWVLTGSGGNMFTANVRGSNVSSLVKHTWSEAFVSLIEDRGGLSEADKAGFIKRQLVETRQITKHVARILDSRMNTKRDKNDKPIREVKVITLKSKLVSDFRKDFQLYKVRDINNYHHAHDAYLNAVVGTALIKKYPKLESEFVYGDYKVYDVRKMIAKSEQEIGKATAKRFFYSNIMNFFKTEVKLANGEIRKRPLIETNGETGEVVWNKEKDFATVRKVLAMPQVNIVKKTEVQTGGFSKESILSKRESAKLIPRKKGWDTRKYGGFGSPTVAYSILVVAKVEKGKAKKLKSVKVLVGITIMEKGSYEKDPIGFLEAKGYKDIKKELIFKLPKYSLFELENGRRRMLASATELQKANELVLPQHLVRLLYYTQNISATTGSNNLGYIEQHREEFKEIFEKIIDFSEKYILKNKVNSNLKSSFDEQFAVSDSILLSNSFVSLLKYTSFGASGGFTFLDLDVKQGRLRYQTVTEVLDATLIYQSITGLYETRTDLSQLGGDSGGSKRTADGSEFESPKKKRKV

SEQ ID NO: 393 - protein, 1499 aa, Artificial Sequence
  dScCasFok, ancestral RuvC+Rec1/2, HNHdelta with HNS linker, SV40+bipartiteSV40 NLS (TG14322)
  misc_feature: synthetic
MAVTPKKKRKVGGSGSQLVKSELEEKKSELRHKLKYVPHEYIELIEIARNSTQDRILEMKVMEFFMKVYGYRGKHLGGSRKPDGAIYTVGSPIDYGVIVDTKAYSGGYNLPIGQADEMQRYVEENQTRNKHINPNEWWKVYPSSVTEFKFLFVSGHFKGNYKAQLTRLNHITNCNGAVLSVEELLIGGEMIKAGTLTLEEVRRKFNNGEINFSGSETPGTSESATPESMEKKYSIGLAIGTNSVGWAVITDDYKVPSKKFKVLGNTNRKSIKKNLMGALLFDSGETAEATRLKRTARRRYTRRKNRIRYLQEIFANEMAKLDDSFFQRLEESFLVEEDKKNERHPIFGNLADEVAYHRNYPTIYHLRKKLADSPEKADLRLIYLALAHIIKFRGHFLIEGKLNAENSDVAKLFYQLIQTYNQLFEESPLDEIEVDAKGILSARLSKSKRLEKLIAVFPNEKKNGLFGNIIALALGLTPNFKSNFDLTEDAKLQLSKDTYDDDLDELLGQIGDQYADLFSAAKNLSDAILLSDILRSNSEVTKAPLSASMVKRYDEHHQDLALLKTLVRQQLPEKYKEIFSDQSKNGYAGYIDIGIKHRKRTTKRTSQEEFYKFIKPILEKMDGAEELLAKLNREDLLRKQRTFDNGSIPHQIHLGELHAILRRQEEFYPFLKDNREKIEKILTFRIPYYVGPLARGNSRFAWMTRKSDEAITPWNFEEVVDKGASAQSFIERMTNFDEYLPNKKVLPKHSLLYEYFTVYNELTKVKYVTEGMRKPEFLSGEQKEAIVDLLFKTNRKVTVKQLKEDYFKKIECFDSVEIIGVEDRFNASLGTYHDLLKIIKDKDFLDNEENEDILEDIVLTLTLFEDREMIEERLKKYANLFDDKVMKQLKRRHYTGWGRLSRKMINGIRDKQSGKTILDFLKSDGFSNRNFMQLIHDDSLTFKEEIEKAQVSGQGDSLHEQIADLAGSPAIKKGILQTVKIVDELVKVMGHKPENIVIEMARAAVKSGTKAKRAQRPGLSEADKAGFIKRQLVETRQITKHVARILDSRMNTKRDKNDKPIREVKVITLKSKLVSDFRKDFQLYKVRDINNYHHAHDAYLNAVVGTALIKKYPKLESEFVYGDYKVYDVRKMIAKSEQEIGKATAKRFFYSNIMNFFKTEVKLANGEIRKRPLIETNGETGEVVWNKEKDFATVRKVLAMPQVNIVKKTEVQTGGFSKESILSKRESAKLIPRKKGWDTRKYGGFGSPTVAYSILVVAKVEKGKAKKLKSVKVLVGITIMEKGSYEKDPIGFLEAKGYKDIKKELIFKLPKYSLFELENGRRRMLASATELQKANELVLPQHLVRLLYYTQNISATTGSNNLGYIEQHREEFKEIFEKIIDFSEKYILKNKVNSNLKSSFDEQFAVSDSILLSNSFVSLLKYTSFGASGGFTFLDLDVKQGRLRYQTVTEVLDATLIYQSITGLYETRTDLSQLGGDSGGSKRTADGSEFESPKKKRKV

SEQ ID NO: 394 - protein, 1609 aa, Artificial Sequence
  dScCasFok, ancestral RuvC+Rec1/2, ScLoop delta, SV40+nucleoplasminNLS (TG14483)
  misc_feature: synthetic
MAVTPKKKRKVGGSGSQLVKSELEEKKSELRHKLKYVPHEYIELIEIARNSTQDRILEMKVMEFFMKVYGYRGKHLGGSRKPDGAIYTVGSPIDYGVIVDTKAYSGGYNLPIGQADEMQRYVEENQTRNKHINPNEWWKVYPSSVTEFKFLFVSGHFKGNYKAQLTRLNHITNCNGAVLSVEELLIGGEMIKAGTLTLEEVRRKFNNGEINFSGSETPGTSESATPESMEKKYSIGLAIGTNSVGWAVITDDYKVPSKKFKVLGNTNRKSIKKNLMGALLFDSGETAEATRLKRTARRRYTRRKNRIRYLQEIFANEMAKLDDSFFQRLEESFLVEEDKKNERHPIFGNLADEVAYHRNYPTIYHLRKKLADSPEKADLRLIYLALAHIIKFRGHFLIEGKLNAENSDVAKLFYQLIQTYNQLFEESPLDEIEVDAKGILSARLSKSKRLEKLIAVFPNEKKNGLFGNIIALALGLTPNFKSNFDLTEDAKLQLSKDTYDDDLDELLGQIGDQYADLFSAAKNLSDAILLSDILRSNSEVTKAPLSASMVKRYDEHHQDLALLKTLVRQQLPEKYKEIFSDQSKNGYAGYIDIGTSQEEFYKFIKPILEKMDGAEELLAKLNREDLLRKQRTFDNGSIPHQIHLGELHAILRRQEEFYPFLKDNREKIEKILTFRIPYYVGPLARGNSRFAWMTRKSDEAITPWNFEEVVDKGASAQSFIERMTNFDEQLPNKKVLPKHSLLYEYFTVYNELTKVKYVTERMRKPEFLSGEQKKAIVDLLFKTNRKVTVKQLKEDYFKKIECFDSVEIIGVEDRFNASLGTYHDLLKIIKDKDFLDNEENEDILEDIVLTLTLFEDREMIEERLKTYAHLFDDKVMKQLKRRHYTGWGRLSRKMINGIRDKQSGKTILDFLKSDGFSNRNFMQLIHDDSLTFKEEIEKAQVSGQGDSLHEQIADLAGSPAIKKGILQTVKIVDELVKVMGHKPENIVIEMARENQTTTKGLQQSRERKKRIEEGIKELESQILKENPVENTQLQNEKLYLYYLQNGRDMYVDQELDINRLSDYDVDAIVPQSFIKDDSIDNKVLTRSVENRGKSDNVPSEEVVKKMKNYWRQLLNAKLITQRKFDNLTKAERGGLSEADKAGFIKRQLVETRQITKHVARILDSRMNTKRDKNDKPIREVKVITLKSKLVSDFRKDFQLYKVRDINNYHHAHDAYLNAVVGTALIKKYPKLESEFVYGDYKVYDVRKMIAKSEQEIGKATAKRFFYSNIMNFFKTEVKLANGEIRKRPLIETNGETGEVVWNKEKDFATVRKVLAMPQVNIVKKTEVQTGGFSKESILSKRESAKLIPRKKGWDTRKYGGFGSPTVAYSILVVAKVEKGKAKKLKSVKVLVGITIMEKGSYEKDPIGFLEAKGYKDIKKELIFKLPKYSLFELENGRRRMLASATELQKANELVLPQHLVRLLYYTQNISATTGSNNLGYIEQHREEFKEIFEKIIDFSEKYILKNKVNSNLKSSFDEQFAVSDSILLSNSFVSLLKYTSFGASGGFTFLDLDVKQGRLRYQTVTEVLDATLIYQSITGLYETRTDLSQLGGDKRPAATKKAGQAKKKK

SEQ ID NO: 395 - protein, 1619 aa, Artificial Sequence
  dScCasFok, ancestral RuvC+Rec1/2, ScLoopQQ, SV40+nucleoplasminNLS (TG14484)
  misc_feature: synthetic
MAVTPKKKRKVGGSGSQLVKSELEEKKSELRHKLKYVPHEYIELIEIARNSTQDRILEMKVMEFFMKVYGYRGKHLGGSRKPDGAIYTVGSPIDYGVIVDTKAYSGGYNLPIGQADEMQRYVEENQTRNKHINPNEWWKVYPSSVTEFKFLFVSGHFKGNYKAQLTRLNHITNCNGAVLSVEELLIGGEMIKAGTLTLEEVRRKFNNGEINFSGSETPGTSESATPESMEKKYSIGLAIGTNSVGWAVITDDYKVPSKKFKVLGNTNRKSIKKNLMGALLFDSGETAEATRLKRTARRRYTRRKNRIRYLQEIFANEMAKLDDSFFQRLEESFLVEEDKKNERHPIFGNLADEVAYHRNYPTIYHLRKKLADSPEKADLRLIYLALAHIIKFRGHFLIEGKLNAENSDVAKLFYQLIQTYNQLFEESPLDEIEVDAKGILSARLSKSKRLEKLIAVFPNEKKNGLFGNIIALALGLTPNFKSNFDLTEDAKLQLSKDTYDDDLDELLGQIGDQYADLFSAAKNLSDAILLSDILRSNSEVTKAPLSASMVKRYDEHHQDLALLKTLVRQQLPEKYKEIFSDQSKNGYAGYIDIGIKHQKQTTKLTSQEEFYKFIKPILEKMDGAEELLAKLNREDLLRKQRTFDNGSIPHQIHLGELHAILRRQEEFYPFLKDNREKIEKILTFRIPYYVGPLARGNSRFAWMTRKSDEAITPWNFEEVVDKGASAQSFIERMTNFDEQLPNKKVLPKHSLLYEYFTVYNELTKVKYVTERMRKPEFLSGEQKKAIVDLLFKTNRKVTVKQLKEDYFKKIECFDSVEIIGVEDRFNASLGTYHDLLKIIKDKDFLDNEENEDILEDIVLTLTLFEDREMIEERLKTYAHLFDDKVMKQLKRRHYTGWGRLSRKMINGIRDKQSGKTILDFLKSDGFSNRNFMQLIHDDSLTFKEEIEKAQVSGQGDSLHEQIADLAGSPAIKKGILQTVKIVDELVKVMGHKPENIVIEMARENQTTTKGLQQSRERKKRIEEGIKELESQILKENPVENTQLQNEKLYLYYLQNGRDMYVDQELDINRLSDYDVDAIVPQSFIKDDSIDNKVLTRSVENRGKSDNVPSEEVVKKMKNYWRQLLNAKLITQRKFDNLTKAERGGLSEADKAGFIKRQLVETRQITKHVARILDSRMNTKRDKNDKPIREVKVITLKSKLVSDFRKDFQLYKVRDINNYHHAHDAYLNAVVGTALIKKYPKLESEFVYGDYKVYDVRKMIAKSEQEIGKATAKRFFYSNIMNFFKTEVKLANGEIRKRPLIETNGETGEVVWNKEKDFATVRKVLAMPQVNIVKKTEVQTGGFSKESILSKRESAKLIPRKKGWDTRKYGGFGSPTVAYSILVVAKVEKGKAKKLKSVKVLVGITIMEKGSYEKDPIGFLEAKGYKDIKKELIFKLPKYSLFELENGRRRMLASATELQKANELVLPQHLVRLLYYTQNISATTGSNNLGYIEQHREEFKEIFEKIIDFSEKYILKNKVNSNLKSSFDEQFAVSDSILLSNSFVSLLKYTSFGASGGFTFLDLDVKQGRLRYQTVTEVLDATLIYQSITGLYETRTDLSQLGGDKRPAATKKAGQAKKKK

SEQ ID NO: 396 - protein, 1619 aa, Artificial Sequence
  dScCasFok, ancestral RuvC+Rec1/2, ScLoopAA, SV40+nucleoplasminNLS (TG14485)
  misc_feature: synthetic
MAVTPKKKRKVGGSGSQLVKSELEEKKSELRHKLKYVPHEYIELIEIARNSTQDRILEMKVMEFFMKVYGYRGKHLGGSRKPDGAIYTVGSPIDYGVIVDTKAYSGGYNLPIGQADEMQRYVEENQTRNKHINPNEWWKVYPSSVTEFKFLFVSGHFKGNYKAQLTRLNHITNCNGAVLSVEELLIGGEMIKAGTLTLEEVRRKFNNGEINFSGSETPGTSESATPESMEKKYSIGLAIGTNSVGWAVITDDYKVPSKKFKVLGNTNRKSIKKNLMGALLFDSGETAEATRLKRTARRRYTRRKNRIRYLQEIFANEMAKLDDSFFQRLEESFLVEEDKKNERHPIFGNLADEVAYHRNYPTIYHLRKKLADSPEKADLRLIYLALAHIIKFRGHFLIEGKLNAENSDVAKLFYQLIQTYNQLFEESPLDEIEVDAKGILSARLSKSKRLEKLIAVFPNEKKNGLFGNIIALALGLTPNFKSNFDLTEDAKLQLSKDTYDDDLDELLGQIGDQYADLFSAAKNLSDAILLSDILRSNSEVTKAPLSASMVKRYDEHHQDLALLKTLVRQQLPEKYKEIFSDQSKNGYAGYIDIGIKHAKATTKLTSQEEFYKFIKPILEKMDGAEELLAKLNREDLLRKQRTFDNGSIPHQIHLGELHAILRRQEEFYPFLKDNREKIEKILTFRIPYYVGPLARGNSRFAWMTRKSDEAITPWNFEEVVDKGASAQSFIERMTNFDEQLPNKKVLPKHSLLYEYFTVYNELTKVKYVTERMRKPEFLSGEQKKAIVDLLFKTNRKVTVKQLKEDYFKKIECFDSVEIIGVEDRFNASLGTYHDLLKIIKDKDFLDNEENEDILEDIVLTLTLFEDREMIEERLKTYAHLFDDKVMKQLKRRHYTGWGRLSRKMINGIRDKQSGKTILDFLKSDGFSNRNFMQLIHDDSLTFKEEIEKAQVSGQGDSLHEQIADLAGSPAIKKGILQTVKIVDELVKVMGHKPENIVIEMARENQTTTKGLQQSRERKKRIEEGIKELESQILKENPVENTQLQNEKLYLYYLQNGRDMYVDQELDINRLSDYDVDAIVPQSFIKDDSIDNKVLTRSVENRGKSDNVPSEEVVKKMKNYWRQLLNAKLITQRKFDNLTKAERGGLSEADKAGFIKRQLVETRQITKHVARILDSRMNTKRDKNDKPIREVKVITLKSKLVSDFRKDFQLYKVRDINNYHHAHDAYLNAVVGTALIKKYPKLESEFVYGDYKVYDVRKMIAKSEQEIGKATAKRFFYSNIMNFFKTEVKLANGEIRKRPLIETNGETGEVVWNKEKDFATVRKVLAMPQVNIVKKTEVQTGGFSKESILSKRESAKLIPRKKGWDTRKYGGFGSPTVAYSILVVAKVEKGKAKKLKSVKVLVGITIMEKGSYEKDPIGFLEAKGYKDIKKELIFKLPKYSLFELENGRRRMLASATELQKANELVLPQHLVRLLYYTQNISATTGSNNLGYIEQHREEFKEIFEKIIDFSEKYILKNKVNSNLKSSFDEQFAVSDSILLSNSFVSLLKYTSFGASGGFTFLDLDVKQGRLRYQTVTEVLDATLIYQSITGLYETRTDLSQLGGDKRPAATKKAGQAKKKK

SEQ ID NO: 397 - DNA, 10629 bp, Mus musculus
  misc_feature: MPO chromosome 11, GRCm38.p4 C57BL/6J DNA SEQ. ACCESSION: NC_000077
ataacttctcagctttagctccctgaattttggttctttcaaaggatttgggacactcagtttaaccaacactttgaggggctggttgtttgtgctctccgggagaagctctgatccattcctttgtccacccctccttcttcatagacccctttctgtgcacccctaaccccagtgggggaggagagtctagtcttgggataggtccatctctttttaggtcagcccgcccccagcttttacaccccaggcataaaaacccgttgtcagtgagaggagttgacagtgtcaggtaagtggtgaagttgagctcttggggactggggactatagctggagggggtcttgggttgtacacctcttcatagaccaggcccactagggtagggctgtgtataaaggggagaggagggggcttgggaggaggagaattgtaaaacctctcttttttcaaaagctctggatacttcctgagctgaggtttttgttttttgtcttgttttgttttgttttgttttgttttgttttgttttgttttgttttgttttgtttttttaaaggtttatttatttattatatgtaagtacactgcagctgtccttagatactccagaagagagcatcagattttgttacggatggttgtgagccaccatgtggttgctgggatttgaactcgggacctttggaagagcagtcggcgctcttaaccactgagcaatctccccagcccccttgttttttgtcttgcagagatgaagctactcttggccttggcaggcctcctggcccctctggccatgcttcagacctccaatggtgccaccccaggtgatagtgccaaaaggagggtggactaagggattgggggtagggggtggggattctcagcccagcatctccccttcccctggataggcttcctttgctttggggcctgatgtagggctttggggccagccctgaccttatgatttatgctctgggcagctctcctgggggaagtggagaattcagttgtgctgagctgtatggaagaggccaagcagctagtggacagagcctacaaggagcggagagaaaggtgagggtgccaggccctgtgtggccctgggcaaaactgcttcaagtcttctggagaaagggcacacagtggggggaggggggttgtagaaaggatgagggcctacaggtgaaatcgtacctggtctgcctctacttgagtttctggctgtcagaacatcttcagtggccttgctttctgtctggacatccaggtccatgtccttttgacaaaagaaatgcactgctcctccgtggttctctccagagttctttctgcctgctcaccgcaggctggcctttgctgagtgtctctatcccccttctctggccctcccttgtctaaacagcatcaagcggagcctccaaagcggctctgccagccccacggagctcctgttttacttcaagcagccggtggcgggcaccagaacagctgtgagggccgctgattatctacatgtggccctagacctgctgaagaggaagctgcagcccctgtggccaaggcctttcaatgttacaggtactctaactccttttgtgctaccacctccaccccaagcaacttctgtctccaagcctccattcaaggcagtggttcttaacctgtgggtcgctaccccttcgggtacgtcaagtgaccctctcacatgggtccacctaagaccataggaaaacacaggtcttaacattatgattcatctcagtagcaaaattacagttatgaagtagcaagtaattttatagttctgttcaccccatgagaaactggcttaaggggtctctcagcattagcaaacttgagaaccactggtctaaggagtctcggggcctctgagctggcccacccccctcctcaccctcactgggctactcagccccaggttgcctagcataggaaatgaggtgggggaaggctcggatctaagatcatggctcactcttgcagatgtgttgacacctgctcagctgaatctgttgtccgtgtcaagtggctgtgcctatcaggacgtgagggtgacatgcccaccgaatgacaagtatcgcaccatcactggacactgcaacaacaggtgtgggcccagggcagttcagggttgtgtggtgtagggggtctaggtcttgcctgtggcgacccattgggccagagctctgtgcttccctctagacgaagccccactctgggggcctccaaccgtgcctttgtacgctggttgcctgcagagtatgaagatggcgtctccatgccctttggctggacgcctggagtcaatcgcaatggcttcaaggtgcccctggtgagtgtccagtagagggaggtgagcccagctaagcttatgtgcaggacctaggcatccaatgactcctgttgttgctgcaggctcgccaggtctccaatgccatcgtgcgcttccccaacgatcagctgaccaaggaccaggagcgtgcactcatgttcatgcagtggggacagtttctggatcatgatatcaccttgactccagagccagctacccggttctccttcttcactggcctcaactgcgagaccagctgcctgcagcagccaccctgcttccccctcaaggtgctgcctccttccatccatcagggtctgtgtctgaagagagggaagatggtttacattagtgacggcgccccttctgagtcctaggtcctctctagcccctgagcaagactggtcctcgctcctgggcccagagtcaatacttggctccctcagcagagccagctgtcaactcaaggaacctgatatgcaccctgatatgcaccctgaacttagcatcgctctgtgtggtggggtgactggttctttgtgaggctgggagaattctgggatgaggatctgacttgtcttcttcatactcccaatgtacaggcactggcctgttctcactctctctcccctatgggcgctcccctaaccctgcttcacagtgtgtgtgtgtgtgtgtgtgtgtgtgtaaccctgcttcacagtgtgtgtgtgtgtgtgtgtgtgtgtgtgtgtgtgtgtgtgtgtgtgtgtgtgtgtgtgtttgggttgccccatagtcagggtcagggttgaagcaccttctgtgtaggggggaaagtgtggagaaaaagaaaggcagagattaaggagataaagggccaggggtctgacagggccagggtgacagaacagagaggaaaaggcagacacaggcaagaagaggattaagaggcatagtgaagaggggtccaagtggccttgcccaaccccagaaggctctctccattccagttcagtgaattctttgtcacccttaaacctcagtctctttgctgactgagccccagtatttctatgaaaccttgagagcttccctgcagctcgagggggccagagttctcttctgcagggtgtaagttacaaatgcccgctctcccgacccacaaaagccagcctagcttctctctgtgctgtagatcccacccaatgaccctcgaatcaagaaccaaaaggactgcatccccttcttccgctcctgcccggcatgcaccaggaacaacatcaccattcgcaaccagatcaacgcgctcacttccttcgtggacgccagcggggtgtacggcagcgaggaccccctagccagaaagctgcgcaacctcaccaaccagctggggctgctggctatcaatacacgcttccaagacaatggcagggccctgatgccctttgacagcctgcacgatgacccctgcctcctcaccaaccgctccgcccgcattccttgttttctggcaggtcagcccggggactgaactagagtggcatagagctgtttccagcttgtgagaacacagcctgtatgtgagcaacatgcgggcttgtgataagagatgctggtctcaacaacttattagtctagttgccttggtaacgagttggatggagacagaaaggaaaataacagcaaaaatcaaaccacataagcatacaaaaaaaaaatcctccatccatcaactgaagatggagtcacagggctgctaaggaccctctattattgatccagctttctctgtcttctccctcctgtggactgtggaaaaagagagagccaagtctatgtccacaagggacagagaactaaaagtgacagagaggaatatggcatcctcaccttttagaaccatcctgtccaatctggagctagtagccacatgtggttatttcaatttaaattctttgtagcagggagtactggctcacacctttaatcccagtctttgggaggtagaggcatgaggctcttagtgagaattcaaggccagcctggtctacagagtgagttctaggacagccagggctatagagtgatagtgagaccctgtcttgaaagaagaagaagaagaagaagaagaagaagaagaagaagaagaagaagaagaagaagaagaagaagaagaagaagaagaagaagaagaagaagaagaaaacaaccaataaatacataaataattttaaattaaattaaaagtttctgcagtaactgcattttaagggctcagtagtccatgggtgaagaagtggttgttttcttcacctcagaaaattctagtagattgtgtcacagaatatcactccgtgagctttttggtttcttagaaagacagaaggtgggatttcaaaaggagagatgtttggcagtttggggataggattggggcaggggttgtggtcacacccagaaattgatgcctctccctcacacctctctgtgattttagactgggttatagctagccttcgcaggtctggtacttgctttgaagcccaggctagcttcaaacattcctcaatcttcctatcttagcctgtcaagtgttgggtggctcacatgtaccatcaagcccacacacagcgggaggtctcttcttgcacctcccttcccttctaggggtccagttggtctctcctgggtcccctggcagggcagccaaggtcaatgcaagggtgtgtctcctaagggagggcctgctctcttctggactggtcatgacctctggttactcatggggtggaaaagctactctcaggaatatgttttcctctcagaattttctttctaagttggcaagggctgagcccagtcagtgtcttgcagcaaaggccctggcccccaccttctggccttccctgttgaaggtttatggagcactagaggaatcggggacttcattttcttgaatagtcttaggtatggatgtacacattccgtgccctcttcccaccatgacaggatgtacagtggcttatagtgagagtgataatgacaactgtcttcaaatagtagagggtttggggtcctgttttgagaaggcttctgaggttgatccaatttgagcagaaaacatgcatattactttttggcttgtgccaatgagtacttgctcttgggagtgttcatgtattgtggagtgtgtgtgtatgtgtgtgtagtatgtatgtatgtatgtatgcatgcatgcatataagtatgtgtagtatgtgtgtgtaatatgtctgtatgtctgtgtagtgtgtatgcatatgtatatatgtgtgtatgtatagtatgtgtatgtagtatgtgtatatgttattatgagtgtgtatagtatgtatgtgtatagtgtatgtgcatgcatatataatgtatatgtatgtgtgcatatgtgtgtagtatgtgtacatgtgtgtgtgtagtaaatggcaaaatacagaaagacacagggcttggccttgtgcctaaggatcttgtgcctaaggtctgctccaggcaggtgacaagtcaaatgtaatggctattgggtaaggctgcagggagtaccacagtgttcctgagctcttatgccagcctgtggctcacacttgaatctggtgtgtgggagtaggtggaaaacaggcacgtgagggccactgaagctctttgctggtcaggagatgatggagaccataaaggtgacaaaggctttgcttccctcaggggacatgcgctccagcgagatgccggagctcacctccatgcacaccctctttgttcgagagcataaccggctggccacacagctcaagcgcctgaatcctcgatggaatggggagaagctctaccaggaggcccggaagattgtaggggccatggtccaggtaggctgtgtcctaacacatcttggccatgtgttcttgggcagtttttttttttaaatctctcctgaacactggcttttttttatccataaaaggctcaaaggagcgaaatgaaaatgcccctcagacatgagatgcttggcgagtgcacttcccttcctcctgtctccccggccctcttccttcctgagggcctgaggagttgagagggtcttaagcagaagcaccagagtcaccgctggctcttttacccgctgtcatcatcttgagcattcccccacccccacccccacccccaccccacccctgccacccggggcagggctcctccatctggtttttgatgttttcatgacccctaatttcccaagaatgtaaacattcgtgcatatcacacacacacacacacacaacacacacacacacacacacacacacatacacacactccctagactttagggagggggtgtggttagtgctgagcatggggttttgattgacaggcacacccacaagagggattcactttggtctcagaggcaattctagccttaggtccagagtgacactgtctcacagcctttgggggacatcgcactggagcagacctctgccatctctctgtctataaacctgtactgagccctactgtgtgctagtctattgctggacactgtgaataatctcagtaatttcaacttccctgggtctcaaggggaaatgggaccactaataccttaaagacacgggggatattacaatgactaaaaagacattttgtttaatcctgagagagagggagagagaattattccttgtttacatttgtggttcagagagtttaataaatgacctgaggtgagttctatttatgtccttctgttaaaatctaagacctaagactatgggagactgatcctagccaggtaggggcaattcccccaagctggagaccacagggaggaacaaatagacatctaacacaaagtgactttgttttagatcatcacataccgggactacctgcccttggtgttggggccagcagccatgaagaagtacctaccccagtaccgatcttacaacgactcagtagaccctcgaatcgccaatgtcttcaccaacgctttccgttatggccacaccctcatccaacccttcatgttccgcctgaacaatcagtaccggcccacagggcccaacccccgagtcccactcagcaaggtcttttttgccagctggagagtcgtgttggaaggtgaatggaacctaagaaaagccagcagctaatgatgggatggtggctgcagagacctaggctagggagaggtcttttttcatcttggggaacccagtcttgctttccactttcattgacttagaaggctagcgcatcccaaccttgtgaaccctcccccaaccctccaagtgttgcaagagcttatagcttctctctgacccctacgattccacttggaccagccctgactccactgtgtgctctcatagtaagagaaccaacctttcctttcactctggtctcttgtcctcaggtggcattgaccccatcctccgaggcctcatggccactccagccaaactgaatcgccagaatcaaattgtggtggatgagatccgggagcgactatttgagcaagtcatgaggataggactggatttgcctgctcttaacatgcagcgcagccgggatcacggcctcccaggtgagaggccagccacagccccatcccacctcccaggcagctccccttcttgctcaggggtcctttccagttttatggatgcacctgaggcaaggcgctgccttttccagcccctggtggcctaagttcggcctctcttggcttcttcacaagctggacttttgcaacccgcgtagcagctgaacatcatcccacgatctggaagtctgcctccatcgttagcacgttctgactcattcatgaactcgcgggtgggagagtaccactgtcatttttactgacgaggaaactagggcttagagcagttcagagtctggctcggtgtggttgccacgtcagtgagagacgtggaggttggacctaaggggatcagcggaacccaaaagccccgtgcctgtgttgtggagtagcacaagtggccacgcctctgggaaacgttttcattctctgagtcagagaaagatacattaggctgctgctctaagggacaatgtgctgtttccgtgcttgagtctggcgggatttgtggtaatacagggctggccagggtaggagagagtgaggaaaagagtgagaggtctggaggagcccagctgcctactttggcctgagccaatcatttagggatccattctacttacggtcttgtgtactgagatgggcttttgaacatctgtgtattctttcctgcccttcccagtactcctagccggcaggagaggggtccatttacagctacctgttctctggcccaacgcaggatacaatgcctggagacgcttttgtgggcttccacagcccagcacagtgggtgagctcggcacggtgctgaagaacctggagttggcacggaagctgatggcacaatatggcacgcccaacaacattgacatctggatgggcggtgtgtccgagcccctggagcccaatggccgtgtaggccagctccttgcctgcctcattggcactcagtttaggaagctacgtgatggtgatcggtaaggaagctgtgggaaagcagggtgccacaactgtgaggccgggagggggcgcatgcgcaccgcagcagtcaggcggcgcttagagaacaacttatctgtgagttggttccatcatgtctggtctagggatggtagtcaagttctcagccttggtggtacgtgcctttgcccactgaaccatcttgctggtcccaaaaatgccactcttaataggttctctgggtttctcagtgctactgtggaggcgtcagttaccatggaaaagtgccaaaagtctcccgctgaccccttttcatgtcatttcatcacgatcttggaatctccgtgtctagttcttatctagcttgcattacacctttggcaatatcgtaaaaaggtgtcccagtcaagaagagaacatcacaaatgccacccaggctttcttttaccccgtgggagcgtgcatcagactgggacccaagcagctgtgcttctgtcttctgggctgagtgggcactgcccacgacctgagctctcctgtgctgtagataagaatattctgaagccccctcacactcaggggacgtctcaagccaggggatgtcctgggtagcctcactcgggacatcctcagacataatgtccacgatgctccctcccatgcaggttttggtgggagaacccaggcgtgttcagtaaacagcagagacaggccttggccagcatctccttgccccgtatcatctgtgacaacactggcatcaccaccgtgtcgaagaacaacatcttcatgtccaacacatacccccgagactttgtcagctgtaacacccttcctaaactgaacctgacttcctggaaggagacctagaggttgggtaagggcttggcacactgaagggtatacctggttggctagtgggaatcacagagaactctcttccctgggtgaatccatctttgtggatattgtgggtgacagtggggggtggggggaaatgactggacattcacttgtgagtgcacaagtatatttgcatatacacttgtgcacatctatatatatgcaacatacataaactagtatttcatgtgtgtctggtctgtgagcatgggcaatgtttgatgtgccttgtgtgcctgccaatcacatgagtctgggctcactgcttacgacaatattaggaacgtggggacagtgagcagacagcccgagttcaagtcatcaccctgtagcacagtactgtgtgtgactttggccaaattactctaaggataaattctcttccttataaatgaaatcagccacggcttgttagagggcctattgcctcctccaactctccactcatggagcagctcccatgtgctaggcactgtgctagccatgggaagcagaaacaataaagatgaataccaaagatgaatgccaaatcctcgatcaccttctggttggcagaaacaaggtggtggcctccggaggagaggatgcagctagcagctgggctgtgtggttgtgatacagttctgggccagctctgcttaactggctatttctccttttcccttactctcttctcttgctattcacaggagtctgccgggagaaggacggaggccattggccttcctgtgctatttgtacctgaggttcacactaataaaacatggtggatgggga

SEQ ID NO: 398 - protein, 718 aa, Mus musculus
  MISC_FEATURE: MPO PROTEIN SEQ. ACCESSION: NP_034954
MKLLLALAGLLAPLAMLQTSNGATPALLGEVENSVVLSCMEEAKQLVDRAYKERRESIKRSLQSGSASPTELLFYFKQPVAGTRTAVRAADYLHVALDLLKRKLQPLWPRPFNVTDVLTPAQLNLLSVSSGCAYQDVRVTCPPNDKYRTITGHCNNRRSPTLGASNRAFVRWLPAEYEDGVSMPFGWTPGVNRNGFKVPLARQVSNAIVRFPNDQLTKDQERALMFMQWGQFLDHDITLTPEPATRFSFFTGLNCETSCLQQPPCFPLKIPPNDPRIKNQKDCIPFFRSCPACTRNNITIRNQINALTSFVDASGVYGSEDPLARKLRNLTNQLGLLAINTRFQDNGRALMPFDSLHDDPCLLTNRSARIPCFLAGDMRSSEMPELTSMHTLFVREHNRLATQLKRLNPRWNGEKLYQEARKIVGAMVQIITYRDYLPLVLGPAAMKKYLPQYRSYNDSVDPRIANVFTNAFRYGHTLIQPFMFRLNNQYRPTGPNPRVPLSKVFFASWRVVLEGGIDPILRGLMATPAKLNRQNQIVVDEIRERLFEQVMRIGLDLPALNMQRSRDHGLPGYNAWRRFCGLPQPSTVGELGTVLKNLELARKLMAQYGTPNNIDIWMGGVSEPLEPNGRVGQLLACLIGTQFRKLRDGDRFWWENPGVFSKQQRQALASISLPRIICDNTGITTVSKNNIFMSNTYPRDFVSCNTLPKLNLTSWKET

SEQ ID NO: 399 - protein, 4 aa, Artificial Sequence
  short linker
  misc_feature: synthetic
GGSG

SEQ ID NO: 400 - protein, 7 aa, Simian virus 40
  MISC_FEATURE: SV40 nuclear localization sequence
PKKKRKV

SEQ ID NO: 401 - protein, 16 aa, Mus musculus
  MISC_FEATURE: nucleoplasmin nuclear localization sequence
KRPAATKKAGQAKKKK

SEQ ID NO: 402 - protein, 18 aa, Simian virus 40
  MISC_FEATURE: bipartite SV40 nuclear localization sequence
KRTADGSEFESPKKKRKV

SEQ ID NO: 403 - protein, 6 aa, Artificial Sequence
  6 x His tag
HHHHHH

SEQ ID NO: 404 - protein, 34 aa, Artificial Sequence
  TALE non-specific
  misc_feature: synthetic
LTPEQVVAIASNSGGKQALETVQRLLPVLCQAHG

SEQ ID NO: 405 - protein, 111 aa, Homo sapiens
  MISC_FEATURE: Human SSB1, domain 1
MTTETFVKDIKPGLKNLNLIFIVLETGRVTKTKDGHEVRTCKVADKTGSINISVWDDVGNLIQPGDIIRLTKGYASVFKGCLTLYTGRGGDLQKIGEFCMVYSEVPNFSEP

SEQ ID NO: 406 - protein, 1526 aa, Artificial Sequence
  dScCas9-FokI, HNH delta, AvrBS3 PAMBD loop replacement, 2NLS
  misc_feature: synthetic
MAVTPKKKRKVGGSGSQLVKSELEEKKSELRHKLKYVPHEYIELIEIARNSTQDRILEMKVMEFFMKVYGYRGKHLGGSRKPDGAIYTVGSPIDYGVIVDTKAYSGGYNLPIGQADEMQRYVEENQTRNKHINPNEWWKVYPSSVTEFKFLFVSGHFKGNYKAQLTRLNHITNCNGAVLSVEELLIGGEMIKAGTLTLEEVRRKFNNGEINFSGSETPGTSESATPESMEKKYSIGLAIGTNSVGWAVITDDYKVPSKKFKVLGNTNRKSIKKNLMGALLFDSGETAEATRLKRTARRRYTRRKNRIRYLQEIFANEMAKLDDSFFQRLEESFLVEEDKKNERHPIFGNLADEVAYHRNYPTIYHLRKKLADSPEKADLRLIYLALAHIIKFRGHFLIEGKLNAENSDVAKLFYQLIQTYNQLFEESPLDEIEVDAKGILSARLSKSKRLEKLIAVFPNEKKNGLFGNIIALALGLTPNFKSNFDLTEDAKLQLSKDTYDDDLDELLGQIGDQYADLFSAAKNLSDAILLSDILRSNSEVTKAPLSASMVKRYDEHHQDLALLKTLVRQQFPEKYAEIFKDDTKNGYAGYVGIGIKHRKRTTKLATQEEFYKFIKPILEKMDGAEELLAKLNRDDLLRKQRTFDNGSIPHQIHLKELHAILRRQEEFYPFLKENREKIEKILTFRIPYYVGPLARGNSRFAWLTRKSEEAITPWNFEEVVDKGASAQSFIERMTNFDEQLPNKKVLPKHSLLYEYFTVYNELTKVKYVTERMRKPEFLSGEQKKAIVDLLFKTNRKVTVKQLKEDYFKKIECFDSVEIIGVEDRFNASLGTYHDLLKIIKDKDFLDNEENEDILEDIVLTLTLFEDREMIEERLKTYAHLFDDKVMKQLKRRHYTGWGRLSRKMINGIRDKQSGKTILDFLKSDGFSNRNFMQLIHDDSLTFKEEIEKAQVSGQGDSLHEQIADLAGSPAIKKGILQTVKIVDELVKVMGHKPENIVIEMARENQTTTKGLQQSRERKKRGGSGGLSEADKAGFIKRQLVETRQITKHVARILDSRMNTKRDKNDKPIREVKVITLKSKLVSDFRKDFQLYKVRDINNYHHAHDAYLNAVVGTALIKKYPKLESEFVYGDYKVYDVRKMIAKSEQEIGKATAKRFFYSNIMNFFKTEVKLANGEIRKRPLIETNGETGEVVWNKEKDFATVRKVLAMPQVNIVKKTEVQTGGFSKESILSKRESAKLIPRKKGWDTRKYGGFGSPTVAYSILVVAKVEKGKAKKLKSVKVLVGITIMEKGSYEKDPIGFLEAKGYKDIKKELIFKLPKYSLFELENGRRRMLASATELQKANELVLPQHLVRLLYYTQNISATTGSNNLGYIEQHREEFKEIFEKIIDFSEKYILKNKVNSNLKSSFDEQFAVSDSILLSNSFVSLLKYTSFGAGGSAGLTPEQVVAIASNSGGKQALETVQRLLPVLCQAHGGGSGYQTVTEVLDATLIYQSITGLYETRTDLSQLGGDKRPAATKKAGQAKKKK

SEQ ID NO: 407 - protein, 1512 aa, Artificial Sequence
  dScCas9-FokI, HNHdelta, AvrBS3 PAMBD domain replacement, 2NLS
  misc_feature: synthetic
MAVTPKKKRKVGGSGSQLVKSELEEKKSELRHKLKYVPHEYIELIEIARNSTQDRILEMKVMEFFMKVYGYRGKHLGGSRKPDGAIYTVGSPIDYGVIVDTKAYSGGYNLPIGQADEMQRYVEENQTRNKHINPNEWWKVYPSSVTEFKFLFVSGHFKGNYKAQLTRLNHITNCNGAVLSVEELLIGGEMIKAGTLTLEEVRRKFNNGEINFSGSETPGTSESATPESMEKKYSIGLAIGTNSVGWAVITDDYKVPSKKFKVLGNTNRKSIKKNLMGALLFDSGETAEATRLKRTARRRYTRRKNRIRYLQEIFANEMAKLDDSFFQRLEESFLVEEDKKNERHPIFGNLADEVAYHRNYPTIYHLRKKLADSPEKADLRLIYLALAHIIKFRGHFLIEGKLNAENSDVAKLFYQLIQTYNQLFEESPLDEIEVDAKGILSARLSKSKRLEKLIAVFPNEKKNGLFGNIIALALGLTPNFKSNFDLTEDAKLQLSKDTYDDDLDELLGQIGDQYADLFSAAKNLSDAILLSDILRSNSEVTKAPLSASMVKRYDEHHQDLALLKTLVRQQFPEKYAEIFKDDTKNGYAGYVGIGIKHRKRTTKLATQEEFYKFIKPILEKMDGAEELLAKLNRDDLLRKQRTFDNGSIPHQIHLKELHAILRRQEEFYPFLKENREKIEKILTFRIPYYVGPLARGNSRFAWLTRKSEEAITPWNFEEVVDKGASAQSFIERMTNFDEQLPNKKVLPKHSLLYEYFTVYNELTKVKYVTERMRKPEFLSGEQKKAIVDLLFKTNRKVTVKQLKEDYFKKIECFDSVEIIGVEDRFNASLGTYHDLLKIIKDKDFLDNEENEDILEDIVLTLTLFEDREMIEERLKTYAHLFDDKVMKQLKRRHYTGWGRLSRKMINGIRDKQSGKTILDFLKSDGFSNRNFMQLIHDDSLTFKEEIEKAQVSGQGDSLHEQIADLAGSPAIKKGILQTVKIVDELVKVMGHKPENIVIEMARENQTTTKGLQQSRERKKRGGSGGLSEADKAGFIKRQLVETRQITKHVARILDSRMNTKRDKNDKPIREVKVITLKSKLVSDFRKDFQLYKVRDINNYHHAHDAYLNAVVGTALIKKYPKLESEFVYGDYKVYDVRKMIAKSEQEIGKATAKRFFYSNIMNFFKTEVKLANGEIRKRPLIETNGETGEVVWNKEKDFATVRKVLAMPQVNIVKKTEVQTGGFSKESILSKRESAKLIPRKKGWDTRKYGGFGSPTVAYSILVVAKVEKGKAKKLKSVKVLVGITIMEKGSYEKDPIGFLEAKGYKDIKKELIFKLPKYSLFELENGRRRMLASATELQKAGGSAGGTGGSLTPEQVVAIASNSGGKQALETVQRLLPVLCQAHGLTPEQVVAIASNSGGKQALETVQRLLPVLCQAHGLTPEQVVAIASNSGGKQALETVQRLLPVLCQAHGGGSAGGTGGSYQTVTEVLDATLIYQSITGLYETRTDLSQLGGDKRPAATKKAGQAKKKK

SEQ ID NO: 408 - DNA, 695 bp, Artificial Sequence
  PD-1 Exon dScCasFok SCNA cassette 14082
  misc_feature: synthetic
acgcgtaaaaaaaaagcaccgactcggtgccactttttcaagttgataacggactagccttattttaacttgctatttctagctctaaaaccaggcatgcagatcccacagggtgtttcgtggtctcatacagaacttataagattcccaaatccaaagacatttcacgtttatggtgatttcccagaacacatagcgacatgcaaatattgcagggcgccactcccctgtccctcacagccatcttcctgccagggcgcacgcgcgctgggtgttcccgcctagtgacactgggcccgcgattccttggagcgggttgatgacgtcagcgttcaaagagggcctatttcccatgattccttcatatttgcatatacgatacaaggctgttagagagataattggaattaatttgactgtaaacacaaagatattagtacaaaatacgtgacgtagaaagtaataatttcttgggtagtttgcagttttaaaattatgttttaaaatggactatcatatgcttaccgtaacttgaaagtatttcgatttcttggctttatatatcttgtggaaaggacgaaacaccgtctgggcggtgctacaactgttttagagctagaaatagcaagttaaaataaggctagtccgttatcaacttgaaaaagtggcaccgagtcggtgctttttttacgcgt

SEQ ID NO: 409 - DNA, 695 bp, Artificial Sequence
  PD-1 Exon dScCasFok SCNA cassette 14084
  misc_feature: synthetic
acgcgtaaaaaaaaagcaccgactcggtgccactttttcaagttgataacggactagccttattttaacttgctatttctagctctaaaaccccagttgtagcaccgcccaggtgtttcgtggtctcatacagaacttataagattcccaaatccaaagacatttcacgtttatggtgatttcccagaacacatagcgacatgcaaatattgcagggcgccactcccctgtccctcacagccatcttcctgccagggcgcacgcgcgctgggtgttcccgcctagtgacactgggcccgcgattccttggagcgggttgatgacgtcagcgttcaaagagggcctatttcccatgattccttcatatttgcatatacgatacaaggctgttagagagataattggaattaatttgactgtaaacacaaagatattagtacaaaatacgtgacgtagaaagtaataatttcttgggtagtttgcagttttaaaattatgttttaaaatggactatcatatgcttaccgtaacttgaaagtatttcgatttcttggctttatatatcttgtggaaaggacgaaacacccgcctgtgggatctgcatgcgttttagagctagaaatagcaagttaaaataaggctagtccgttatcaacttgaaaaagtggcaccgagtcggtgctttttttacgcgt

SEQ ID NO: 410 - DNA, 695 bp, Artificial Sequence
  PD-1 Exon dScCasFok SCNA cassette 14086
  misc_feature: synthetic
acgcgtaaaaaaaaagcaccgactcggtgccactttttcaagttgataacggactagccttattttaacttgctatttctagctctaaaacccagcccagttgtagcaccgggtgtttcgtggtctcatacagaacttataagattcccaaatccaaagacatttcacgtttatggtgatttcccagaacacatagcgacatgcaaatattgcagggcgccactcccctgtccctcacagccatcttcctgccagggcgcacgcgcgctgggtgttcccgcctagtgacactgggcccgcgattccttggagcgggttgatgacgtcagcgttcaaagagggcctatttcccatgattccttcatatttgcatatacgatacaaggctgttagagagataattggaattaatttgactgtaaacacaaagatattagtacaaaatacgtgacgtagaaagtaataatttcttgggtagtttgcagttttaaaattatgttttaaaatggactatcatatgcttaccgtaacttgaaagtatttcgatttcttggctttatatatcttgtggaaaggacgaaacaccagggcgcctgtgggatctgcgttttagagctagaaatagcaagttaaaataaggctagtccgttatcaacttgaaaaagtggcaccgagtcggtgctttttttacgcgt

SEQ ID NO: 411 - DNA, 389 bp, Artificial Sequence
  PD-1 Exon Cas9 sgRNA cassette 14106
  misc_feature: synthetic
gagggcctatttcccatgattccttcatatttgcatatacgatacaaggctgttagagagataattggaattaatttgactgtaaacacaaagatattagtacaaaatacgtgacgtagaaagtaataatttcttgggtagtttgcagttttaaaattatgttttaaaatggactatcatatgcttaccgtaacttgaaagtatttcgatttcttggctttatatatcttgtggaaaggacgaaacaccggcgccctggccagtcgtctgttttagagctagaaatagcaagttaaaataaggctagtccgttatcaacttgaaaaagtggcaccgagtcggtgctttttttacgcgtacttgcggccgcatattcctaggataccggt

SEQ ID NO: 412 - DNA, 695 bp, Artificial Sequence
  PD-1 Exon dScCasFok SCNA cassette 14078
  misc_feature: synthetic
acgcgtaaaaaaaaagcaccgactcggtgccactttttcaagttgataacggactagccttattttaacttgctatttctagctctaaaactctggtggggctgctccaggggtgtttcgtggtctcatacagaacttataagattcccaaatccaaagacatttcacgtttatggtgatttcccagaacacatagcgacatgcaaatattgcagggcgccactcccctgtccctcacagccatcttcctgccagggcgcacgcgcgctgggtgttcccgcctagtgacactgggcccgcgattccttggagcgggttgatgacgtcagcgttcaaagagggcctatttcccatgattccttcatatttgcatatacgatacaaggctgttagagagataattggaattaatttgactgtaaacacaaagatattagtacaaaatacgtgacgtagaaagtaataatttcttgggtagtttgcagttttaaaattatgttttaaaatggactatcatatgcttaccgtaacttgaaagtatttcgatttcttggctttatatatcttgtggaaaggacgaaacaccggcgccctggccagtcgtctgttttagagctagaaatagcaagttaaaataaggctagtccgttatcaacttgaaaaagtggcaccgagtcggtgctttttttacgcgt

SEQ ID NO: 413 - DNA, 695 bp, Artificial Sequence
  PD-1 Exon dScCasFok SCNA cassette 14080
  misc_feature: synthetic
acgcgtaaaaaaaaagcaccgactcggtgccactttttcaagttgataacggactagccttattttaacttgctatttctagctctaaaactggtggggctgctccaggcaggtgtttcgtggtctcatacagaacttataagattcccaaatccaaagacatttcacgtttatggtgatttcccagaacacatagcgacatgcaaatattgcagggcgccactcccctgtccctcacagccatcttcctgccagggcgcacgcgcgctgggtgttcccgcctagtgacactgggcccgcgattccttggagcgggttgatgacgtcagcgttcaaagagggcctatttcccatgattccttcatatttgcatatacgatacaaggctgttagagagataattggaattaatttgactgtaaacacaaagatattagtacaaaatacgtgacgtagaaagtaataatttcttgggtagtttgcagttttaaaattatgttttaaaatggactatcatatgcttaccgtaacttgaaagtatttcgatttcttggctttatatatcttgtggaaaggacgaaacacccgccctggccagtcgtctgggttttagagctagaaatagcaagttaaaataaggctagtccgttatcaacttgaaaaagtggcaccgagtcggtgctttttttacgcgt

SEQ ID NO: 414 - DNA, 695 bp, Artificial Sequence
  PD-1 Exon dScCasFok SCNA cassette 14088
  misc_feature: synthetic
acgcgtaaaaaaaaagcaccgactcggtgccactttttcaagttgataacggactagccttattttaacttgctatttctagctctaaaacatcccacaggcgccctggccggtgtttcgtggtctcatacagaacttataagattcccaaatccaaagacatttcacgtttatggtgatttcccagaacacatagcgacatgcaaatattgcagggcgccactcccctgtccctcacagccatcttcctgccagggcgcacgcgcgctgggtgttcccgcctagtgacactgggcccgcgattccttggagcgggttgatgacgtcagcgttcaaagagggcctatttcccatgattccttcatatttgcatatacgatacaaggctgttagagagataattggaattaatttgactgtaaacacaaagatattagtacaaaatacgtgacgtagaaagtaataatttcttgggtagtttgcagttttaaaattatgttttaaaatggactatcatatgcttaccgtaacttgaaagtatttcgatttcttggctttatatatcttgtggaaaggacgaaacaccgctacaactgggctggcggcgttttagagctagaaatagcaagttaaaataaggctagtccgttatcaacttgaaaaagtggcaccgagtcggtgctttttttacgcgt

SEQ ID NO: 415 - DNA, 695 bp, Artificial Sequence
  PD-1 Exon dScCasFok SCNA cassette 14090
  misc_feature: synthetic
acgcgtaaaaaaaaagcaccgactcggtgccactttttcaagttgataacggactagccttattttaacttgctatttctagctctaaaacacaggcgccctggccagtcgggtgtttcgtggtctcatacagaacttataagattcccaaatccaaagacatttcacgtttatggtgatttcccagaacacatagcgacatgcaaatattgcagggcgccactcccctgtccctcacagccatcttcctgccagggcgcacgcgcgctgggtgttcccgcctagtgacactgggcccgcgattccttggagcgggttgatgacgtcagcgttcaaagagggcctatttcccatgattccttcatatttgcatatacgatacaaggctgttagagagataattggaattaatttgactgtaaacacaaagatattagtacaaaatacgtgacgtagaaagtaataatttcttgggtagtttgcagttttaaaattatgttttaaaatggactatcatatgcttaccgtaacttgaaagtatttcgatttcttggctttatatatcttgtggaaaggacgaaacaccaactgggctggcggccaggagttttagagctagaaatagcaagttaaaataaggctagtccgttatcaacttgaaaaagtggcaccgagtcggtgctttttttacgcgt

SEQ ID NO: 416 - DNA, 97 bp, Artificial Sequence
  RHO gene 5'-3' fragment of figure 6
  misc_feature: synthetic
cttctacgtgcccttctccaatgcgacgggtgtggtacgcagccacttcgagtacccacagtactacctggctgagccatggcagttctccatgctg

SEQ ID NO: 417 - DNA, 98 bp, Artificial Sequence
  RHO gene 3'-5' fragment of figure 6
  misc_feature: synthetic
gaagatgcacgggaagaggttacgctgcccacaccatgcgtcggtgaagctcatgggtgtcatgatggaccgactcggtaccgtcaagaggtacgacc

SEQ ID NO: 418 - DNA, 61 bp, Artificial Sequence
  COMP gene 5'-3' fragment of figure 7
  misc_feature: synthetic
cccaggaggactcagaccacgatggccagggtgatgcctgcgacgacgacgacaatgacgg

SEQ ID NO: 419 - DNA, 61 bp, Artificial Sequence
  COMP gene 3'-5' fragment of figure 7
  misc_feature: synthetic
gggtcctcctgagtctggtgctaccggtcccactacggacgctgctgctgctgttactgcc

SEQ ID NO: 420 - DNA, 77 bp, Artificial Sequence
  PDCD1 gene 5'-3' fragment of figure 8
  misc_feature: synthetic
ccctgcgcctcctatgcggagatgctactgccactgctgctgtcctcgctgctgggcggtgagtgggccaagggccg

SEQ ID NO: 421 - DNA, 77 bp, Artificial Sequence
  PDCD1 gene 3'-5' fragment of figure 8
  misc_feature: synthetic
gggacgcggaggatacgcctctacgatgacggtgacgacgacaggagcgacgacccgccactcacccggttcccggc

SEQ ID NO: 422 - protein, 25 aa, Artificial Sequence
  PDCD1 amino acid sequence of figure 8
  misc_feature: synthetic
MQIPQAPWPVVWAVLQLGWRPGWFL

SEQ ID NO: 423 - DNA, 15 bp, Artificial Sequence
  PD-1 Exon drop-off probe TGEE40
  misc_feature: synthetic
  misc_feature (8)..(8): g is a locked nucleic acid
  misc_feature (9)..(9): c is a locked nucleic acid
cgccctggccagtcg

SEQ ID NO: 424 - DNA, 17 bp, Artificial Sequence
  PD-1 Exon forward primer
  misc_feature: synthetic
gtttcccttccgctcac

SEQ ID NO: 425 - DNA, 19 bp, Artificial Sequence
  PD-1 Exon reverse primer
  misc_feature: synthetic
gggactgagagtgaaaggt

SEQ ID NO: 426 - protein, 1612 aa, Artificial Sequence
  dScCasFok, N-terminal HMGN, ancestral RuvC+Rec1/2, HNH delta with longer linker, SV40 and bipartite SV40 NLS
  misc_feature: synthetic
MAVTPKKKRKVPKRKVSSAEGAAKEEPKRRSARLSAKPPAKVEAKPKKAAAKDKSSDKKVQTKGKRGAKGKQAEVANQETKEDLPAENGETKTEESPASDEAGEKEAKSDGGSGSQLVKSELEEKKSELRHKLKYVPHEYIELIEIARNSTQDRILEMKVMEFFMKVYGYRGKHLGGSRKPDGAIYTVGSPIDYGVIVDTKAYSGGYNLPIGQADEMQRYVEENQTRNKHINPNEWWKVYPSSVTEFKFLFVSGHFKGNYKAQLTRLNHITNCNGAVLSVEELLIGGEMIKAGTLTLEEVRRKFNNGEINFSGSETPGTSESATPESMEKKYSIGLAIGTNSVGWAVITDDYKVPSKKFKVLGNTNRKSIKKNLMGALLFDSGETAEATRLKRTARRRYTRRKNRIRYLQEIFANEMAKLDDSFFQRLEESFLVEEDKKNERHPIFGNLADEVAYHRNYPTIYHLRKKLADSPEKADLRLIYLALAHIIKFRGHFLIEGKLNAENSDVAKLFYQLIQTYNQLFEESPLDEIEVDAKGILSARLSKSKRLEKLIAVFPNEKKNGLFGNIIALALGLTPNFKSNFDLTEDAKLQLSKDTYDDDLDELLGQIGDQYADLFSAAKNLSDAILLSDILRSNSEVTKAPLSASMVKRYDEHHQDLALLKTLVRQQLPEKYKEIFSDQSKNGYAGYIDIGIKHRKRTTKRTSQEEFYKFIKPILEKMDGAEELLAKLNREDLLRKQRTFDNGSIPHQIHLGELHAILRRQEEFYPFLKDNREKIEKILTFRIPYYVGPLARGNSRFAWMTRKSDEAITPWNFEEVVDKGASAQSFIERMTNFDEYLPNKKVLPKHSLLYEYFTVYNELTKVKYVTEGMRKPEFLSGEQKEAIVDLLFKTNRKVTVKQLKEDYFKKIECFDSVEIIGVEDRFNASLGTYHDLLKIIKDKDFLDNEENEDILEDIVLTLTLFEDREMIEERLKKYANLFDDKVMKQLKRRHYTGWGRLSRKMINGIRDKQSGKTILDFLKSDGFSNRNFMQLIHDDSLTFKEEIEKAQVSGQGDSLHEQIADLAGSPAIKKGILQTVKIVDELVKVMGHKPENIVIEMARENQTTTKGLQQSRERKKRGGSAGGTGGSGGLSEADKAGFIKRQLVETRQITKHVARILDSRMNTKRDKNDKPIREVKVITLKSKLVSDFRKDFQLYKVRDINNYHHAHDAYLNAVVGTALIKKYPKLESEFVYGDYKVYDVRKMIAKSEQEIGKATAKRFFYSNIMNFFKTEVKLANGEIRKRPLIETNGETGEVVWNKEKDFATVRKVLAMPQVNIVKKTEVQTGGFSKESILSKRESAKLIPRKKGWDTRKYGGFGSPTVAYSILVVAKVEKGKAKKLKSVKVLVGITIMEKGSYEKDPIGFLEAKGYKDIKKELIFKLPKYSLFELENGRRRMLASATELQKANELVLPQHLVRLLYYTQNISATTGSNNLGYIEQHREEFKEIFEKIIDFSEKYILKNKVNSNLKSSFDEQFAVSDSILLSNSFVSLLKYTSFGASGGFTFLDLDVKQGRLRYQTVTEVLDATLIYQSITGLYETRTDLSQLGGDSGGSKRTADGSEFESPKKKRKV

SEQ ID NO: 427 - protein, 1541 aa, Artificial Sequence
  dScCasFok, ancestral RuvC+Rec1/2, HNH delta with longer linker, PAMBD loop replaced with Zinc Finger+longer linker, SV40 and bipartite SV40 NLS
  misc_feature: synthetic
MAVTPKKKRKVGGSGSQLVKSELEEKKSELRHKLKYVPHEYIELIEIARNSTQDRILEMKVMEFFMKVYGYRGKHLGGSRKPDGAIYTVGSPIDYGVIVDTKAYSGGYNLPIGQADEMQRYVEENQTRNKHINPNEWWKVYPSSVTEFKFLFVSGHFKGNYKAQLTRLNHITNCNGAVLSVEELLIGGEMIKAGTLTLEEVRRKFNNGEINFSGSETPGTSESATPESMEKKYSIGLAIGTNSVGWAVITDDYKVPSKKFKVLGNTNRKSIKKNLMGALLFDSGETAEATRLKRTARRRYTRRKNRIRYLQEIFANEMAKLDDSFFQRLEESFLVEEDKKNERHPIFGNLADEVAYHRNYPTIYHLRKKLADSPEKADLRLIYLALAHIIKFRGHFLIEGKLNAENSDVAKLFYQLIQTYNQLFEESPLDEIEVDAKGILSARLSKSKRLEKLIAVFPNEKKNGLFGNIIALALGLTPNFKSNFDLTEDAKLQLSKDTYDDDLDELLGQIGDQYADLFSAAKNLSDAILLSDILRSNSEVTKAPLSASMVKRYDEHHQDLALLKTLVRQQLPEKYKEIFSDQSKNGYAGYIDIGIKHRKRTTKRTSQEEFYKFIKPILEKMDGAEELLAKLNREDLLRKQRTFDNGSIPHQIHLGELHAILRRQEEFYPFLKDNREKIEKILTFRIPYYVGPLARGNSRFAWMTRKSDEAITPWNFEEVVDKGASAQSFIERMTNFDEYLPNKKVLPKHSLLYEYFTVYNELTKVKYVTEGMRKPEFLSGEQKEAIVDLLFKTNRKVTVKQLKEDYFKKIECFDSVEIIGVEDRFNASLGTYHDLLKIIKDKDFLDNEENEDILEDIVLTLTLFEDREMIEERLKKYANLFDDKVMKQLKRRHYTGWGRLSRKMINGIRDKQSGKTILDFLKSDGFSNRNFMQLIHDDSLTFKEEIEKAQVSGQGDSLHEQIADLAGSPAIKKGILQTVKIVDELVKVMGHKPENIVIEMARENQTTTKGLQQSRERKKRGGSAGGTGGSGGLSEADKAGFIKRQLVETRQITKHVARILDSRMNTKRDKNDKPIREVKVITLKSKLVSDFRKDFQLYKVRDINNYHHAHDAYLNAVVGTALIKKYPKLESEFVYGDYKVYDVRKMIAKSEQEIGKATAKRFFYSNIMNFFKTEVKLANGEIRKRPLIETNGETGEVVWNKEKDFATVRKVLAMPQVNIVKKTEVQTGGFSKESILSKRESAKLIPRKKGWDTRKYGGFGSPTVAYSILVVAKVEKGKAKKLKSVKVLVGITIMEKGSYEKDPIGFLEAKGYKDIKKELIFKLPKYSLFELENGRRRMLASATELQKANELVLPQHLVRLLYYTQNISATTGSNNLGYIEQHREEFKEIFEKIIDFSEKYILKNKVNSNLKSSFDEQFAVSDSILLSNSFVSLLKYTSFGAAGGSAGGTGGSAGGSGAPYRCPCRAGCPSLASMQAHMRGHSGGSGYQTVTEVLDATLIYQSITGLYETRTDLSQLGGDSGGSKRTADGSEFESPKKKRKV

SEQ ID NO: 428 - protein, 1457 aa, Artificial Sequence
  dScCasFok, ancestral RuvC+Rec1/2, HNH delta with longer linker, PAMBD replaced with Lac repressor DBD, SV40 and bipartite SV40 NLS
  misc_feature: synthetic
MAVTPKKKRKVGGSGSQLVKSELEEKKSELRHKLKYVPHEYIELIEIARNSTQDRILEMKVMEFFMKVYGYRGKHLGGSRKPDGAIYTVGSPIDYGVIVDTKAYSGGYNLPIGQADEMQRYVEENQTRNKHINPNEWWKVYPSSVTEFKFLFVSGHFKGNYKAQLTRLNHITNCNGAVLSVEELLIGGEMIKAGTLTLEEVRRKFNNGEINFSGSETPGTSESATPESMEKKYSIGLAIGTNSVGWAVITDDYKVPSKKFKVLGNTNRKSIKKNLMGALLFDSGETAEATRLKRTARRRYTRRKNRIRYLQEIFANEMAKLDDSFFQRLEESFLVEEDKKNERHPIFGNLADEVAYHRNYPTIYHLRKKLADSPEKADLRLIYLALAHIIKFRGHFLIEGKLNAENSDVAKLFYQLIQTYNQLFEESPLDEIEVDAKGILSARLSKSKRLEKLIAVFPNEKKNGLFGNIIALALGLTPNFKSNFDLTEDAKLQLSKDTYDDDLDELLGQIGDQYADLFSAAKNLSDAILLSDILRSNSEVTKAPLSASMVKRYDEHHQDLALLKTLVRQQLPEKYKEIFSDQSKNGYAGYIDIGIKHRKRTTKRTSQEEFYKFIKPILEKMDGAEELLAKLNREDLLRKQRTFDNGSIPHQIHLGELHAILRRQEEFYPFLKDNREKIEKILTFRIPYYVGPLARGNSRFAWMTRKSDEAITPWNFEEVVDKGASAQSFIERMTNFDEYLPNKKVLPKHSLLYEYFTVYNELTKVKYVTEGMRKPEFLSGEQKEAIVDLLFKTNRKVTVKQLKEDYFKKIECFDSVEIIGVEDRFNASLGTYHDLLKIIKDKDFLDNEENEDILEDIVLTLTLFEDREMIEERLKKYANLFDDKVMKQLKRRHYTGWGRLSRKMINGIRDKQSGKTILDFLKSDGFSNRNFMQLIHDDSLTFKEEIEKAQVSGQGDSLHEQIADLAGSPAIKKGILQTVKIVDELVKVMGHKPENIVIEMARENQTTTKGLQQSRERKKRGGSAGGTGGSGGLSEADKAGFIKRQLVETRQITKHVARILDSRMNTKRDKNDKPIREVKVITLKSKLVSDFRKDFQLYKVRDINNYHHAHDAYLNAVVGTALIKKYPKLESEFVYGDYKVYDVRKMIAKSEQEIGKATAKRFFYSNIMNFFKTEVKLANGEIRKRPLIETNGETGEVVWNKEKDFATVRKVLAMPQVNIVKKTEVQTGGFSKESILSKRESAKLIPRKKGWDTRKYGGFGSPTVAYSILVVAKVEKGKAKKLKSVKVLVGITIMEKGSYEKDPIGFLEAKGYKDIKKELIFKLPKYSLFELENGRRRMLASATELQKAGGSGMKPVTLYDVAEYAGVSYQTVSRVVNQASHVSAKTREKVEAAMAELNGGSGYQTVTEVLDATLIYQSITGLYETRTDLSQLGGDSGGSKRTADGSEFESPKKKRKV

SEQ ID NO: 429 - protein, 1477 aa, Artificial Sequence
  dScCasFok, ancestral RuvC+Rec1/2, HNH delta with longer linker, PAMBD replaced with Sto7, SV40 and bipartite SV40 NLS
  misc_feature: synthetic
MAVTPKKKRKVGGSGSQLVKSELEEKKSELRHKLKYVPHEYIELIEIARNSTQDRILEMKVMEFFMKVYGYRGKHLGGSRKPDGAIYTVGSPIDYGVIVDTKAYSGGYNLPIGQADEMQRYVEENQTRNKHINPNEWWKVYPSSVTEFKFLFVSGHFKGNYKAQLTRLNHITNCNGAVLSVEELLIGGEMIKAGTLTLEEVRRKFNNGEINFSGSETPGTSESATPESMEKKYSIGLAIGTNSVGWAVITDDYKVPSKKFKVLGNTNRKSIKKNLMGALLFDSGETAEATRLKRTARRRYTRRKNRIRYLQEIFANEMAKLDDSFFQRLEESFLVEEDKKNERHPIFGNLADEVAYHRNYPTIYHLRKKLADSPEKADLRLIYLALAHIIKFRGHFLIEGKLNAENSDVAKLFYQLIQTYNQLFEESPLDEIEVDAKGILSARLSKSKRLEKLIAVFPNEKKNGLFGNIIALALGLTPNFKSNFDLTEDAKLQLSKDTYDDDLDELLGQIGDQYADLFSAAKNLSDAILLSDILRSNSEVTKAPLSASMVKRYDEHHQDLALLKTLVRQQLPEKYKEIFSDQSKNGYAGYIDIGIKHRKRTTKRTSQEEFYKFIKPILEKMDGAEELLAKLNREDLLRKQRTFDNGSIPHQIHLGELHAILRRQEEFYPFLKDNREKIEKILTFRIPYYVGPLARGNSRFAWMTRKSDEAITPWNFEEVVDKGASAQSFIERMTNFDEYLPNKKVLPKHSLLYEYFTVYNELTKVKYVTEGMRKPEFLSGEQKEAIVDLLFKTNRKVTVKQLKEDYFKKIECFDSVEIIGVEDRFNASLGTYHDLLKIIKDKDFLDNEENEDILEDIVLTLTLFEDREMIEERLKKYANLFDDKVMKQLKRRHYTGWGRLSRKMINGIRDKQSGKTILDFLKSDGFSNRNFMQLIHDDSLTFKEEIEKAQVSGQGDSLHEQIADLAGSPAIKKGILQTVKIVDELVKVMGHKPENIVIEMARENQTTTKGLQQSRERKKRGGSAGGTGGSGGLSEADKAGFIKRQLVETRQITKHVARILDSRMNTKRDKNDKPIREVKVITLKSKLVSDFRKDFQLYKVRDINNYHHAHDAYLNAVVGTALIKKYPKLESEFVYGDYKVYDVRKMIAKSEQEIGKATAKRFFYSNIMNFFKTEVKLANGEIRKRPLIETNGETGEVVWNKEKDFATVRKVLAMPQVNIVKKTEVQTGGFSKESILSKRESAKLIPRKKGWDTRKYGGFGSPTVAYSILVVAKVEKGKAKKLKSVKVLVGITIMEKGSYEKDPIGFLEAKGYKDIKKELIFKLPKYSLFELENGRRRMLASATELQKAGGSAGMATVKFKYKGEEKEVDISKIKKVWRVGKMISFTYDEGGGKTGRGAVSEKDAPKELLQMLEKQKKGGSAGYQTVTEVLDATLIYQSITGLYETRTDLSQLGGDSGGSKRTADGSEFESPKKKRKV

SEQ ID NO: 430 - protein, 1640 aa, Artificial Sequence
  dScCasFok, N-terminal HMGN, ancestral RuvC+Rec1/2, HNH delta with longer linker, PAMBD loop replaced with Zinc Finger+longer linker, SV40 and bipartite SV40 NLS
  misc_feature: synthetic
MAVTPKKKRKVPKRKVSSAEGAAKEEPKRRSARLSAKPPAKVEAKPKKAAAKDKSSDKKVQTKGKRGAKGKQAEVANQETKEDLPAENGETKTEESPASDEAGEKEAKSDGGSGSQLVKSELEEKKSELRHKLKYVPHEYIELIEIARNSTQDRILEMKVMEFFMKVYGYRGKHLGGSRKPDGAIYTVGSPIDYGVIVDTKAYSGGYNLPIGQADEMQRYVEENQTRNKHINPNEWWKVYPSSVTEFKFLFVSGHFKGNYKAQLTRLNHITNCNGAVLSVEELLIGGEMIKAGTLTLEEVRRKFNNGEINFSGSETPGTSESATPESMEKKYSIGLAIGTNSVGWAVITDDYKVPSKKFKVLGNTNRKSIKKNLMGALLFDSGETAEATRLKRTARRRYTRRKNRIRYLQEIFANEMAKLDDSFFQRLEESFLVEEDKKNERHPIFGNLADEVAYHRNYPTIYHLRKKLADSPEKADLRLIYLALAHIIKFRGHFLIEGKLNAENSDVAKLFYQLIQTYNQLFEESPLDEIEVDAKGILSARLSKSKRLEKLIAVFPNEKKNGLFGNIIALALGLTPNFKSNFDLTEDAKLQLSKDTYDDDLDELLGQIGDQYADLFSAAKNLSDAILLSDILRSNSEVTKAPLSASMVKRYDEHHQDLALLKTLVRQQLPEKYKEIFSDQSKNGYAGYIDIGIKHRKRTTKRTSQEEFYKFIKPILEKMDGAEELLAKLNREDLLRKQRTFDNGSIPHQIHLGELHAILRRQEEFYPFLKDNREKIEKILTFRIPYYVGPLARGNSRFAWMTRKSDEAITPWNFEEVVDKGASAQSFIERMTNFDEYLPNKKVLPKHSLLYEYFTVYNELTKVKYVTEGMRKPEFLSGEQKEAIVDLLFKTNRKVTVKQLKEDYFKKIECFDSVEIIGVEDRFNASLGTYHDLLKIIKDKDFLDNEENEDILEDIVLTLTLFEDREMIEERLKKYANLFDDKVMKQLKRRHYTGWGRLSRKMINGIRDKQSGKTILDFLKSDGFSNRNFMQLIHDDSLTFKEEIEKAQVSGQGDSLHEQIADLAGSPAIKKGILQTVKIVDELVKVMGHKPENIVIEMARENQTTTKGLQQSRERKKRGGSAGGTGGSGGLSEADKAGFIKRQLVETRQITKHVARILDSRMNTKRDKNDKPIREVKVITLKSKLVSDFRKDFQLYKVRDINNYHHAHDAYLNAVVGTALIKKYPKLESEFVYGDYKVYDVRKMIAKSEQEIGKATAKRFFYSNIMNFFKTEVKLANGEIRKRPLIETNGETGEVVWNKEKDFATVRKVLAMPQVNIVKKTEVQTGGFSKESILSKRESAKLIPRKKGWDTRKYGGFGSPTVAYSILVVAKVEKGKAKKLKSVKVLVGITIMEKGSYEKDPIGFLEAKGYKDIKKELIFKLPKYSLFELENGRRRMLASATELQKANELVLPQHLVRLLYYTQNISATTGSNNLGYIEQHREEFKEIFEKIIDFSEKYILKNKVNSNLKSSFDEQFAVSDSILLSNSFVSLLKYTSFGAAGGSAGGTGGSAGGSGAPYRCPCRAGCPSLASMQAHMRGHSGGSGYQTVTEVLDATLIYQSITGLYETRTDLSQLGGDSGGSKRTADGSEFESPKKKRKV

SEQ ID NO: 431 - protein, 1556 aa, Artificial Sequence
  dScCasFok, N-terminal HMGN, ancestral RuvC+Rec1/2, HNH delta with longer linker, PAMBD replaced with Lac repressor DBD, SV40 and bipartite SV40 NLS
  misc_feature: synthetic
MAVTPKKKRKVPKRKVSSAEGAAKEEPKRRSARLSAKPPAKVEAKPKKAAAKDKSSDKKVQTKGKRGAKGKQAEVANQETKEDLPAENGETKTEESPASDEAGEKEAKSDGGSGSQLVKSELEEKKSELRHKLKYVPHEYIELIEIARNSTQDRILEMKVMEFFMKVYGYRGKHLGGSRKPDGAIYTVGSPIDYGVIVDTKAYSGGYNLPIGQADEMQRYVEENQTRNKHINPNEWWKVYPSSVTEFKFLFVSGHFKGNYKAQLTRLNHITNCNGAVLSVEELLIGGEMIKAGTLTLEEVRRKFNNGEINFSGSETPGTSESATPESMEKKYSIGLAIGTNSVGWAVITDDYKVPSKKFKVLGNTNRKSIKKNLMGALLFDSGETAEATRLKRTARRRYTRRKNRIRYLQEIFANEMAKLDDSFFQRLEESFLVEEDKKNERHPIFGNLADEVAYHRNYPTIYHLRKKLADSPEKADLRLIYLALAHIIKFRGHFLIEGKLNAENSDVAKLFYQLIQTYNQLFEESPLDEIEVDAKGILSARLSKSKRLEKLIAVFPNEKKNGLFGNIIALALGLTPNFKSNFDLTEDAKLQLSKDTYDDDLDELLGQIGDQYADLFSAAKNLSDAILLSDILRSNSEVTKAPLSASMVKRYDEHHQDLALLKTLVRQQLPEKYKEIFSDQSKNGYAGYIDIGIKHRKRTTKRTSQEEFYKFIKPILEKMDGAEELLAKLNREDLLRKQRTFDNGSIPHQIHLGELHAILRRQEEFYPFLKDNREKIEKILTFRIPYYVGPLARGNSRFAWMTRKSDEAITPWNFEEVVDKGASAQSFIERMTNFDEYLPNKKVLPKHSLLYEYFTVYNELTKVKYVTEGMRKPEFLSGEQKEAIVDLLFKTNRKVTVKQLKEDYFKKIECFDSVEIIGVEDRFNASLGTYHDLLKIIKDKDFLDNEENEDILEDIVLTLTLFEDREMIEERLKKYANLFDDKVMKQLKRRHYTGWGRLSRKMINGIRDKQSGKTILDFLKSDGFSNRNFMQLIHDDSLTFKEEIEKAQVSGQGDSLHEQIADLAGSPAIKKGILQTVKIVDELVKVMGHKPENIVIEMARENQTTTKGLQQSRERKKRGGSAGGTGGSGGLSEADKAGFIKRQLVETRQITKHVARILDSRMNTKRDKNDKPIREVKVITLKSKLVSDFRKDFQLYKVRDINNYHHAHDAYLNAVVGTALIKKYPKLESEFVYGDYKVYDVRKMIAKSEQEIGKATAKRFFYSNIMNFFKTEVKLANGEIRKRPLIETNGETGEVVWNKEKDFATVRKVLAMPQVNIVKKTEVQTGGFSKESILSKRESAKLIPRKKGWDTRKYGGFGSPTVAYSILVVAKVEKGKAKKLKSVKVLVGITIMEKGSYEKDPIGFLEAKGYKDIKKELIFKLPKYSLFELENGRRRMLASATELQKAGGSGMKPVTLYDVAEYAGVSYQTVSRVVNQASHVSAKTREKVEAAMAELNGGSGYQTVTEVLDATLIYQSITGLYETRTDLSQLGGDSGGSKRTADGSEFESPKKKRKV

SEQ ID NO: 432 - protein, 1576 aa, Artificial Sequence
  dScCasFok, N-terminal HMGN, ancestral RuvC+Rec1/2, HNH delta with longer linker, PAMBD replaced with SSO7D, SV40 and bipartite SV40 NLS
  misc_feature: synthetic
MAVTPKKKRKVPKRKVSSAEGAAKEEPKRRSARLSAKPPAKVEAKPKKAAAKDKSSDKKVQTKGKRGAKGKQAEVANQETKEDLPAENGETKTEESPASDEAGEKEAKSDGGSGSQLVKSELEEKKSELRHKLKYVPHEYIELIEIARNSTQDRILEMKVMEFFMKVYGYRGKHLGGSRKPDGAIYTVGSPIDYGVIVDTKAYSGGYNLPIGQADEMQRYVEENQTRNKHINPNEWWKVYPSSVTEFKFLFVSGHFKGNYKAQLTRLNHITNCNGAVLSVEELLIGGEMIKAGTLTLEEVRRKFNNGEINFSGSETPGTSESATPESMEKKYSIGLAIGTNSVGWAVITDDYKVPSKKFKVLGNTNRKSIKKNLMGALLFDSGETAEATRLKRTARRRYTRRKNRIRYLQEIFANEMAKLDDSFFQRLEESFLVEEDKKNERHPIFGNLADEVAYHRNYPTIYHLRKKLADSPEKADLRLIYLALAHIIKFRGHFLIEGKLNAENSDVAKLFYQLIQTYNQLFEESPLDEIEVDAKGILSARLSKSKRLEKLIAVFPNEKKNGLFGNIIALALGLTPNFKSNFDLTEDAKLQLSKDTYDDDLDELLGQIGDQYADLFSAAKNLSDAILLSDILRSNSEVTKAPLSASMVKRYDEHHQDLALLKTLVRQQLPEKYKEIFSDQSKNGYAGYIDIGIKHRKRTTKRTSQEEFYKFIKPILEKMDGAEELLAKLNREDLLRKQRTFDNGSIPHQIHLGELHAILRRQEEFYPFLKDNREKIEKILTFRIPYYVGPLARGNSRFAWMTRKSDEAITPWNFEEVVDKGASAQSFIERMTNFDEYLPNKKVLPKHSLLYEYFTVYNELTKVKYVTEGMRKPEFLSGEQKEAIVDLLFKTNRKVTVKQLKEDYFKKIECFDSVEIIGVEDRFNASLGTYHDLLKIIKDKDFLDNEENEDILEDIVLTLTLFEDREMIEERLKKYANLFDDKVMKQLKRRHYTGWGRLSRKMINGIRDKQSGKTILDFLKSDGFSNRNFMQLIHDDSLTFKEEIEKAQVSGQGDSLHEQIADLAGSPAIKKGILQTVKIVDELVKVMGHKPENIVIEMARENQTTTKGLQQSRERKKRGGSAGGTGGSGGLSEADKAGFIKRQLVETRQITKHVARILDSRMNTKRDKNDKPIREVKVITLKSKLVSDFRKDFQLYKVRDINNYHHAHDAYLNAVVGTALIKKYPKLESEFVYGDYKVYDVRKMIAKSEQEIGKATAKRFFYSNIMNFFKTEVKLANGEIRKRPLIETNGETGEVVWNKEKDFATVRKVLAMPQVNIVKKTEVQTGGFSKESILSKRESAKLIPRKKGWDTRKYGGFGSPTVAYSILVVAKVEKGKAKKLKSVKVLVGITIMEKGSYEKDPIGFLEAKGYKDIKKELIFKLPKYSLFELENGRRRMLASATELQKAGGSAGMATVKFKYKGEEKEVDISKIKKVWRVGKMISFTYDEGGGKTGRGAVSEKDAPKELLQMLEKQKKGGSAGYQTVTEVLDATLIYQSITGLYETRTDLSQLGGDSGGSKRTADGSEFESPKKKRKV

SEQ ID NO: 433 - protein, 1488 aa, Artificial Sequence
  dScCasFok,HNH delta,PAM replace with Sto7,design 7, SV40+nucleoplasmin NLS
  misc_feature: synthetic
MAVTAPKKKRKVGGSGSQLVKSELEEKKSELRHKLKYVPHEYIELIEIARNSTQDRILEMKVMEFFMKVYGYRGKHLGGSRKPDGAIYTVGSPIDYGVIVDTKAYSGGYNLPIGQADEMQRYVEENQTRNKHINPNEWWKVYPSSVTEFKFLFVSGHFKGNYKAQLTRLNHITNCNGAVLSVEELLIGGEMIKAGTLTLEEVRRKFNNGEINFSGSETPGTSESATPESGTEKKYSIGLAIGTNSVGWAVITDDYKVPSKKFKVLGNTNRKSIKKNLMGALLFDSGETAEATRLKRTARRRYTRRKNRIRYLQEIFANEMAKLDDSFFQRLEESFLVEEDKKNERHPIFGNLADEVAYHRNYPTIYHLRKKLADSPEKADLRLIYLALAHIIKFRGHFLIEGKLNAENSDVAKLFYQLIQTYNQLFEESPLDEIEVDAKGILSARLSKSKRLEKLIAVFPNEKKNGLFGNIIALALGLTPNFKSNFDLTEDAKLQLSKDTYDDDLDELLGQIGDQYADLFSAAKNLSDAILLSDILRSNSEVTKAPLSASMVKRYDEHHQDLALLKTLVRQQFPEKYAEIFKDDTKNGYAGYVGIGIKHRKRTTKLATQEEFYKFIKPILEKMDGAEELLAKLNRDDLLRKQRTFDNGSIPHQIHLKELHAILRRQEEFYPFLKENREKIEKILTFRIPYYVGPLARGNSRFAWLTRKSEEAITPWNFEEVVDKGASAQSFIERMTNFDEQLPNKKVLPKHSLLYEYFTVYNELTKVKYVTERMRKPEFLSGEQKKAIVDLLFKTNRKVTVKQLKEDYFKKIECFDSVEIIGVEDRFNASLGTYHDLLKIIKDKDFLDNEENEDILEDIVLTLTLFEDREMIEERLKTYAHLFDDKVMKQLKRRHYTGWGRLSRKMINGIRDKQSGKTILDFLKSDGFSNRNFMQLIHDDSLTFKEEIEKAQVSGQGDSLHEQIADLAGSPAIKKGILQTVKIVDELVKVMGHKPENIVIEMARENQTTTKGLQQSRERKKRGGSGGLSEADKAGFIKRQLVETRQITKHVARILDSRMNTKRDKNDKPIREVKVITLKSKLVSDFRKDFQLYKVRDINNYHHAHDAYLNAVVGTALIKKYPKLESEFVYGDYKVYDVRKMIAKSEQEIGKATAKRFFYSNIMNFFKTEVKLANGEIRKRPLIETNGETGEVVWNKEKDFATVRKVLAMPQVNIVKKTEVQTGGFSKESILSKRESAKLIPRKKGWDTRKYGGFGSPTVAYSILVVAKVEKGKAKKLKSVKVLVGITIMEKGSYEKDPIGFLEAKGYKDIKKELIFKLPKYSLFELENGRRRMLASATELQKAGGSAGGTGGSAGGVTVKFKYKGEEKEVDISKIKKVWRVGKMISFTYDDNGKTGRGAVSEKDAPKELLQMLEKSGKKGGSAGGTGGSAGGYQTVTEVLDATLIYQSITGLYETRTDLSQLGGDKRPAATKKAGQAKKKKPKKKRKV

SEQ ID NO: 434 - protein, 1575 aa, Artificial Sequence
  dScCasFok,HNH delta,PAM replace with Sto7,design 8, SV40+nucleoplasmin NLS
  misc_feature: synthetic
MAVTAPKKKRKVGGSGSQLVKSELEEKKSELRHKLKYVPHEYIELIEIARNSTQDRILEMKVMEFFMKVYGYRGKHLGGSRKPDGAIYTVGSPIDYGVIVDTKAYSGGYNLPIGQADEMQRYVEENQTRNKHINPNEWWKVYPSSVTEFKFLFVSGHFKGNYKAQLTRLNHITNCNGAVLSVEELLIGGEMIKAGTLTLEEVRRKFNNGEINFSGSETPGTSESATPESGTEKKYSIGLAIGTNSVGWAVITDDYKVPSKKFKVLGNTNRKSIKKNLMGALLFDSGETAEATRLKRTARRRYTRRKNRIRYLQEIFANEMAKLDDSFFQRLEESFLVEEDKKNERHPIFGNLADEVAYHRNYPTIYHLRKKLADSPEKADLRLIYLALAHIIKFRGHFLIEGKLNAENSDVAKLFYQLIQTYNQLFEESPLDEIEVDAKGILSARLSKSKRLEKLIAVFPNEKKNGLFGNIIALALGLTPNFKSNFDLTEDAKLQLSKDTYDDDLDELLGQIGDQYADLFSAAKNLSDAILLSDILRSNSEVTKAPLSASMVKRYDEHHQDLALLKTLVRQQFPEKYAEIFKDDTKNGYAGYVGIGIKHRKRTTKLATQEEFYKFIKPILEKMDGAEELLAKLNRDDLLRKQRTFDNGSIPHQIHLKELHAILRRQEEFYPFLKENREKIEKILTFRIPYYVGPLARGNSRFAWLTRKSEEAITPWNFEEVVDKGASAQSFIERMTNFDEQLPNKKVLPKHSLLYEYFTVYNELTKVKYVTERMRKPEFLSGEQKKAIVDLLFKTNRKVTVKQLKEDYFKKIECFDSVEIIGVEDRFNASLGTYHDLLKIIKDKDFLDNEENEDILEDIVLTLTLFEDREMIEERLKTYAHLFDDKVMKQLKRRHYTGWGRLSRKMINGIRDKQSGKTILDFLKSDGFSNRNFMQLIHDDSLTFKEEIEKAQVSGQGDSLHEQIADLAGSPAIKKGILQTVKIVDELVKVMGHKPENIVIEMARENQTTTKGLQQSRERKKRGGSGGLSEADKAGFIKRQLVETRQITKHVARILDSRMNTKRDKNDKPIREVKVITLKSKLVSDFRKDFQLYKVRDINNYHHAHDAYLNAVVGTALIKKYPKLESEFVYGDYKVYDVRKMIAKSEQEIGKATAKRFFYSNIMNFFKTEVKLANGEIRKRPLIETNGETGEVVWNKEKDFATVRKVLAMPQVNIVKKTEVQTGGFSKESILSKRESAKLIPRKKGWDTRKYGGFGSPTVAYSILVVAKVEKGKAKKLKSVKVLVGITIMEKGSYEKDPIGFLEAKGYKDIKKELIFKLPKYSLFELENGRRRMLASATELQKANELVLPQHLVRLLYYTQNISATTGSNNLGYIEQHREEFKEIFEKIIDFSEKYILKNKVNSNLKSSFDEQFAVSDSILLSNSFVSLLKYTSFGAGGSAGGTGGSVTVKFAYAGEEKEVDISKIKAVWRVGAMISFTYDDNGKTGAGAVSEKDAPKELLQMLEKSGKKGGSAGGTGGSYQTVTEVLDATLIYQSITGLYETRTDLSQLGGDKRPAATKKAGQAKKKKPKKKRKV

SEQ ID NO: 435 - protein, 1590 aa, Artificial Sequence
  dScCasFok,HNH delta,PAM replace with HMGN,design 1, SV40+nucleoplasmin NLS
  misc_feature: synthetic
MAVTPKKKRKVGGSGSQLVKSELEEKKSELRHKLKYVPHEYIELIEIARNSTQDRILEMKVMEFFMKVYGYRGKHLGGSRKPDGAIYTVGSPIDYGVIVDTKAYSGGYNLPIGQADEMQRYVEENQTRNKHINPNEWWKVYPSSVTEFKFLFVSGHFKGNYKAQLTRLNHITNCNGAVLSVEELLIGGEMIKAGTLTLEEVRRKFNNGEINFSGSETPGTSESATPESMEKKYSIGLAIGTNSVGWAVITDDYKVPSKKFKVLGNTNRKSIKKNLMGALLFDSGETAEATRLKRTARRRYTRRKNRIRYLQEIFANEMAKLDDSFFQRLEESFLVEEDKKNERHPIFGNLADEVAYHRNYPTIYHLRKKLADSPEKADLRLIYLALAHIIKFRGHFLIEGKLNAENSDVAKLFYQLIQTYNQLFEESPLDEIEVDAKGILSARLSKSKRLEKLIAVFPNEKKNGLFGNIIALALGLTPNFKSNFDLTEDAKLQLSKDTYDDDLDELLGQIGDQYADLFSAAKNLSDAILLSDILRSNSEVTKAPLSASMVKRYDEHHQDLALLKTLVRQQFPEKYAEIFKDDTKNGYAGYVGIGIKHRKRTTKLATQEEFYKFIKPILEKMDGAEELLAKLNRDDLLRKQRTFDNGSIPHQIHLKELHAILRRQEEFYPFLKENREKIEKILTFRIPYYVGPLARGNSRFAWLTRKSEEAITPWNFEEVVDKGASAQSFIERMTNFDEQLPNKKVLPKHSLLYEYFTVYNELTKVKYVTERMRKPEFLSGEQKKAIVDLLFKTNRKVTVKQLKEDYFKKIECFDSVEIIGVEDRFNASLGTYHDLLKIIKDKDFLDNEENEDILEDIVLTLTLFEDREMIEERLKTYAHLFDDKVMKQLKRRHYTGWGRLSRKMINGIRDKQSGKTILDFLKSDGFSNRNFMQLIHDDSLTFKEEIEKAQVSGQGDSLHEQIADLAGSPAIKKGILQTVKIVDELVKVMGHKPENIVIEMARENQTTTKGLQQSRERKKRGGSGGLSEADKAGFIKRQLVETRQITKHVARILDSRMNTKRDKNDKPIREVKVITLKSKLVSDFRKDFQLYKVRDINNYHHAHDAYLNAVVGTALIKKYPKLESEFVYGDYKVYDVRKMIAKSEQEIGKATAKRFFYSNIMNFFKTEVKLANGEIRKRPLIETNGETGEVVWNKEKDFATVRKVLAMPQVNIVKKTEVQTGGFSKESILSKRESAKLIPRKKGWDTRKYGGFGSPTVAYSILVVAKVEKGKAKKLKSVKVLVGITIMEKGSYEKDPIGFLEAKGYKDIKKELIFKLPKYSLFELENGRRRMLASATELQKANELVLPQHLVRLLYYTQNISATTGSNNLGYIEQHREEFKEIFEKIIDFSEKYILKNKVNSNLKSSFDEQFAVSDSILLSNSFVSLLKYTSFGAGGSGPKRKVSSAEGAAKEEPKRRSARLSAKPPAKVEAKPKKAAAKDKSSDKKVQTKGKRGAKGKQAEVANQETKEDLPAENGETKTEESPASDEAGEKEAKSDGGSGYQTVTEVLDATLIYQSITGLYETRTDLSQLGGDKRPAATKKAGQAKKKK

SEQ ID NO: 436 - protein, 1497 aa, Artificial Sequence
  dScCasFok,HNH delta,PAM replace with HMGN,design 2, SV40+nucleoplasmin NLS
  misc_feature: synthetic
MAVTPKKKRKVGGSGSQLVKSELEEKKSELRHKLKYVPHEYIELIEIARNSTQDRILEMKVMEFFMKVYGYRGKHLGGSRKPDGAIYTVGSPIDYGVIVDTKAYSGGYNLPIGQADEMQRYVEENQTRNKHINPNEWWKVYPSSVTEFKFLFVSGHFKGNYKAQLTRLNHITNCNGAVLSVEELLIGGEMIKAGTLTLEEVRRKFNNGEINFSGSETPGTSESATPESMEKKYSIGLAIGTNSVGWAVITDDYKVPSKKFKVLGNTNRKSIKKNLMGALLFDSGETAEATRLKRTARRRYTRRKNRIRYLQEIFANEMAKLDDSFFQRLEESFLVEEDKKNERHPIFGNLADEVAYHRNYPTIYHLRKKLADSPEKADLRLIYLALAHIIKFRGHFLIEGKLNAENSDVAKLFYQLIQTYNQLFEESPLDEIEVDAKGILSARLSKSKRLEKLIAVFPNEKKNGLFGNIIALALGLTPNFKSNFDLTEDAKLQLSKDTYDDDLDELLGQIGDQYADLFSAAKNLSDAILLSDILRSNSEVTKAPLSASMVKRYDEHHQDLALLKTLVRQQFPEKYAEIFKDDTKNGYAGYVGIGIKHRKRTTKLATQEEFYKFIKPILEKMDGAEELLAKLNRDDLLRKQRTFDNGSIPHQIHLKELHAILRRQEEFYPFLKENREKIEKILTFRIPYYVGPLARGNSRFAWLTRKSEEAITPWNFEEVVDKGASAQSFIERMTNFDEQLPNKKVLPKHSLLYEYFTVYNELTKVKYVTERMRKPEFLSGEQKKAIVDLLFKTNRKVTVKQLKEDYFKKIECFDSVEIIGVEDRFNASLGTYHDLLKIIKDKDFLDNEENEDILEDIVLTLTLFEDREMIEERLKTYAHLFDDKVMKQLKRRHYTGWGRLSRKMINGIRDKQSGKTILDFLKSDGFSNRNFMQLIHDDSLTFKEEIEKAQVSGQGDSLHEQIADLAGSPAIKKGILQTVKIVDELVKVMGHKPENIVIEMARENQTTTKGLQQSRERKKRGGSGGLSEADKAGFIKRQLVETRQITKHVARILDSRMNTKRDKNDKPIREVKVITLKSKLVSDFRKDFQLYKVRDINNYHHAHDAYLNAVVGTALIKKYPKLESEFVYGDYKVYDVRKMIAKSEQEIGKATAKRFFYSNIMNFFKTEVKLANGEIRKRPLIETNGETGEVVWNKEKDFATVRKVLAMPQVNIVKKTEVQTGGFSKESILSKRESAKLIPRKKGWDTRKYGGFGSPTVAYSILVVAKVEKGKAKKLKSVKVLVGITIMEKGSYEKDPIGFLEAKGYKDIKKELIFKLPKYSLFELENGRRRMLASATELQKAGGSGPKRKVSSAEGAAKEEPKRRSARLSAKPPAKVEAKPKKAAAKDKSSDKKVQTKGKRGAKGKQAEVANQETKEDLPAENGETKTEESPASDEAGEKEAKSDGGSGYQTVTEVLDATLIYQSITGLYETRTDLSQLGGDKRPAATKKAGQAKKKK

SEQ ID NO: 437 - protein, 1565 aa, Artificial Sequence
  dScCasFok,HNHdelta,PAM replace with StkC,design 1, SV40+nucleoplasmin NLS
  misc_feature: synthetic
MAVTPKKKRKVGGSGSQLVKSELEEKKSELRHKLKYVPHEYIELIEIARNSTQDRILEMKVMEFFMKVYGYRGKHLGGSRKPDGAIYTVGSPIDYGVIVDTKAYSGGYNLPIGQADEMQRYVEENQTRNKHINPNEWWKVYPSSVTEFKFLFVSGHFKGNYKAQLTRLNHITNCNGAVLSVEELLIGGEMIKAGTLTLEEVRRKFNNGEINFSGSETPGTSESATPESMEKKYSIGLAIGTNSVGWAVITDDYKVPSKKFKVLGNTNRKSIKKNLMGALLFDSGETAEATRLKRTARRRYTRRKNRIRYLQEIFANEMAKLDDSFFQRLEESFLVEEDKKNERHPIFGNLADEVAYHRNYPTIYHLRKKLADSPEKADLRLIYLALAHIIKFRGHFLIEGKLNAENSDVAKLFYQLIQTYNQLFEESPLDEIEVDAKGILSARLSKSKRLEKLIAVFPNEKKNGLFGNIIALALGLTPNFKSNFDLTEDAKLQLSKDTYDDDLDELLGQIGDQYADLFSAAKNLSDAILLSDILRSNSEVTKAPLSASMVKRYDEHHQDLALLKTLVRQQFPEKYAEIFKDDTKNGYAGYVGIGIKHRKRTTKLATQEEFYKFIKPILEKMDGAEELLAKLNRDDLLRKQRTFDNGSIPHQIHLKELHAILRRQEEFYPFLKENREKIEKILTFRIPYYVGPLARGNSRFAWLTRKSEEAITPWNFEEVVDKGASAQSFIERMTNFDEQLPNKKVLPKHSLLYEYFTVYNELTKVKYVTERMRKPEFLSGEQKKAIVDLLFKTNRKVTVKQLKEDYFKKIECFDSVEIIGVEDRFNASLGTYHDLLKIIKDKDFLDNEENEDILEDIVLTLTLFEDREMIEERLKTYAHLFDDKVMKQLKRRHYTGWGRLSRKMINGIRDKQSGKTILDFLKSDGFSNRNFMQLIHDDSLTFKEEIEKAQVSGQGDSLHEQIADLAGSPAIKKGILQTVKIVDELVKVMGHKPENIVIEMARENQTTTKGLQQSRERKKRGGSGGLSEADKAGFIKRQLVETRQITKHVARILDSRMNTKRDKNDKPIREVKVITLKSKLVSDFRKDFQLYKVRDINNYHHAHDAYLNAVVGTALIKKYPKLESEFVYGDYKVYDVRKMIAKSEQEIGKATAKRFFYSNIMNFFKTEVKLANGEIRKRPLIETNGETGEVVWNKEKDFATVRKVLAMPQVNIVKKTEVQTGGFSKESILSKRESAKLIPRKKGWDTRKYGGFGSPTVAYSILVVAKVEKGKAKKLKSVKVLVGITIMEKGSYEKDPIGFLEAKGYKDIKKELIFKLPKYSLFELENGRRRMLASATELQKANELVLPQHLVRLLYYTQNISATTGSNNLGYIEQHREEFKEIFEKIIDFSEKYILKNKVNSNLKSSFDEQFAVSDSILLSNSFVSLLKYTSFGAGGSGSVSMVHSERLPLLMNRNGIRFQSEVIDPNPPKKVKWVLTGSGGNMFTANVRGSNVSSLVKHTWSEAFVSLIEDRGGSGYQTVTEVLDATLIYQSITGLYETRTDLSQLGGDKRPAATKKAGQAKKKK

SEQ ID NO: 438 - protein, 1472 aa, Artificial Sequence
  dScCasFok,HNHdelta,PAM replace with StkC,design 2, SV40+nucleoplasmin NLS
  misc_feature: synthetic
MAVTPKKKRKVGGSGSQLVKSELEEKKSELRHKLKYVPHEYIELIEIARNSTQDRILEMKVMEFFMKVYGYRGKHLGGSRKPDGAIYTVGSPIDYGVIVDTKAYSGGYNLPIGQADEMQRYVEENQTRNKHINPNEWWKVYPSSVTEFKFLFVSGHFKGNYKAQLTRLNHITNCNGAVLSVEELLIGGEMIKAGTLTLEEVRRKFNNGEINFSGSETPGTSESATPESMEKKYSIGLAIGTNSVGWAVITDDYKVPSKKFKVLGNTNRKSIKKNLMGALLFDSGETAEATRLKRTARRRYTRRKNRIRYLQEIFANEMAKLDDSFFQRLEESFLVEEDKKNERHPIFGNLADEVAYHRNYPTIYHLRKKLADSPEKADLRLIYLALAHIIKFRGHFLIEGKLNAENSDVAKLFYQLIQTYNQLFEESPLDEIEVDAKGILSARLSKSKRLEKLIAVFPNEKKNGLFGNIIALALGLTPNFKSNFDLTEDAKLQLSKDTYDDDLDELLGQIGDQYADLFSAAKNLSDAILLSDILRSNSEVTKAPLSASMVKRYDEHHQDLALLKTLVRQQFPEKYAEIFKDDTKNGYAGYVGIGIKHRKRTTKLATQEEFYKFIKPILEKMDGAEELLAKLNRDDLLRKQRTFDNGSIPHQIHLKELHAILRRQEEFYPFLKENREKIEKILTFRIPYYVGPLARGNSRFAWLTRKSEEAITPWNFEEVVDKGASAQSFIERMTNFDEQLPNKKVLPKHSLLYEYFTVYNELTKVKYVTERMRKPEFLSGEQKKAIVDLLFKTNRKVTVKQLKEDYFKKIECFDSVEIIGVEDRFNASLGTYHDLLKIIKDKDFLDNEENEDILEDIVLTLTLFEDREMIEERLKTYAHLFDDKVMKQLKRRHYTGWGRLSRKMINGIRDKQSGKTILDFLKSDGFSNRNFMQLIHDDSLTFKEEIEKAQVSGQGDSLHEQIADLAGSPAIKKGILQTVKIVDELVKVMGHKPENIVIEMARENQTTTKGLQQSRERKKRGGSGGLSEADKAGFIKRQLVETRQITKHVARILDSRMNTKRDKNDKPIREVKVITLKSKLVSDFRKDFQLYKVRDINNYHHAHDAYLNAVVGTALIKKYPKLESEFVYGDYKVYDVRKMIAKSEQEIGKATAKRFFYSNIMNFFKTEVKLANGEIRKRPLIETNGETGEVVWNKEKDFATVRKVLAMPQVNIVKKTEVQTGGFSKESILSKRESAKLIPRKKGWDTRKYGGFGSPTVAYSILVVAKVEKGKAKKLKSVKVLVGITIMEKGSYEKDPIGFLEAKGYKDIKKELIFKLPKYSLFELENGRRRMLASATELQKAGGSGSVSMVHSERLPLLMNRNGIRFQSEVIDPNPPKKVKWVLTGSGGNMFTANVRGSNVSSLVKHTWSEAFVSLIEDRGGSGYQTVTEVLDATLIYQSITGLYETRTDLSQLGGDKRPAATKKAGQAKKKK

SEQ ID NO: 439 - protein, 194 aa, Artificial Sequence
  Ancestral FokI mutant
  misc_feature: synthetic
VKSELEEKKSELRHKLKYLPHEYLELIDIARDPTQNRIFEMKTMELFMKVYGFRGEHLGGSRKPDGAIYTVGLPIDYGVIVDTKAYSGGYNLPIGQADEMQRYIEENQTRNKHINPNEWWKVFPSSITEFKFLFVSGHFKGNFKAQLTRLNHITNCNGAALNVEELLIGAEMIKAGTLTLEEVRRKFNNGEINF

SEQ ID NO: 440 - protein, 1625 aa, Artificial Sequence
  dCasFok, SV40+bipartiteSV40, ancestral mutations in RuvC+REC1/2 domain, D4680
  misc_feature: synthetic
MAVTPKKKRKVGGSGSQLVKSELEEKKSELRHKLKYVPHEYIELIEIARNSTQDRILEMKVMEFFMKVYGYRGKHLGGSRKPDGAIYTVGSPIDYGVIVDTKAYSGGYNLPIGQADEMQRYVEENQTRNKHINPNEWWKVYPSSVTEFKFLFVSGHFKGNYKAQLTRLNHITNCNGAVLSVEELLIGGEMIKAGTLTLEEVRRKFNNGEINFSGSETPGTSESATPESMDKKYSIGLAIGTNSVGWAVITDDYKVPSKKMKVLGNTDRQSIKKNLIGALLFDSGETAEATRLKRTARRRYTRRKNRICYLQEIFANEMAKLDDSFFHRLEESFLVEEDKKHERHPIFGNLVDEVAYHENYPTIYHLRKKLADSTEKADLRLIYLALAHMIKFRGHFLIEGDLNAENSDVDKLFIQLVQTYNQLFEENPINESGVDAKAILSARLSKSRRLENLIAQFPGEKKNGLFGNIIALALGLTPNFKSNFDLTEDAKLQLSKDTYDDDLDELLGQIGDQYADLFLAAKNLSDAILLSDILRVNSEITKAPLSASMVKRYDEHHQDLALLKTLVRQQLPEKYKEIFSDQSKNGYAGYIDIGIKHRKRTTKRTSQEEFYKFIKPILEKMDGAEELLAKLNREDLLRKQRTFDNGSIPHQIHLGELHAILRRQEEFYPFLKDNREKIEKILTFRIPYYVGPLARGNSRFAWMTRKSDEAITPWNFEEVVDKGASAQSFIERMTNFDEYLPNKKVLPKHSLLYEYFTVYNELTKVKYVTEGMRKPEFLSGEQKEAIVDLLFKTNRKVTVKQLKEDYFKKIECFDSVEIIGVEDRFNASLGTYHDLLKIIKDKDFLDNEENEDILEDIVLTLTLFEDREMIEERLKKYANLFDDKVMKQLKRRHYTGWGRLSRKMINGIRDKQSGKTILDFLKSDGFSNRNFMQLIHDDSLTFKEEIEKAQVSGQGDSLHEQIADLAGSPAIKKGILQTVKIVDELVKVMGHKPENIVIEMARENQTTTKGLQQSRERKKRIEEGIKELESQILKENPVENTQLQNEKLYLYYLQNGRDMYVDQELDINRLSDYDVDAIVPQSFIKDDSIDNKVLTRSVENRGKSDNVPSEEVVKKMKNYWRQLLNAKLITQRKFDNLTKAERGGLSEADKAGFIKRQLVETRQITKHVARILDSRMNTKRDKNDKPIREVKVITLKSKLVSDFRKDFQLYKVRDINNYHHAHDAYLNAVVGTALIKKYPKLESEFVYGDYKVYDVRKMIAKSEQEIGKATAKRFFYSNIMNFFKTEVKLANGEIRKRPLIETNGETGEVVWNKEKDFATVRKVLAMPQVNIVKKTEVQTGGFSKESILSKRESAKLIPRKKGWDTRKYGGFGSPTVAYSILVVAKVEKGKAKKLKSVKVLVGITIMEKGSYEKDPIGFLEAKGYKDIKKELIFKLPKYSLFELENGRRRMLASATELQKANELVLPQHLVRLLYYTQNISATTGSNNLGYIEQHREEFKEIFEKIIDFSEKYILKNKVNSNLKSSFDEQFAVSDSILLSNSFVSLLKYTSFGASGGFTFLDLDVKQGRLRYQTVTEVLDATLIYQSITGLYETRTDLSQLGGDSGGSKRTADGSEFESPKKKRKV

SEQ ID NO: 441 - protein, 1631 aa, Artificial Sequence
  dCasFok, SV40+bipartiteSV40, ancestral mutations in RuvC+REC1/2 domain, 6His tag D4681
  misc_feature: synthetic
MAVTPKKKRKVGGSGSQLVKSELEEKKSELRHKLKYVPHEYIELIEIARNSTQDRILEMKVMEFFMKVYGYRGKHLGGSRKPDGAIYTVGSPIDYGVIVDTKAYSGGYNLPIGQADEMQRYVEENQTRNKHINPNEWWKVYPSSVTEFKFLFVSGHFKGNYKAQLTRLNHITNCNGAVLSVEELLIGGEMIKAGTLTLEEVRRKFNNGEINFSGSETPGTSESATPESMDKKYSIGLAIGTNSVGWAVITDDYKVPSKKMKVLGNTDRQSIKKNLIGALLFDSGETAEATRLKRTARRRYTRRKNRICYLQEIFANEMAKLDDSFFHRLEESFLVEEDKKHERHPIFGNLVDEVAYHENYPTIYHLRKKLADSTEKADLRLIYLALAHMIKFRGHFLIEGDLNAENSDVDKLFIQLVQTYNQLFEENPINESGVDAKAILSARLSKSRRLENLIAQFPGEKKNGLFGNIIALALGLTPNFKSNFDLTEDAKLQLSKDTYDDDLDELLGQIGDQYADLFLAAKNLSDAILLSDILRVNSEITKAPLSASMVKRYDEHHQDLALLKTLVRQQLPEKYKEIFSDQSKNGYAGYIDIGIKHRKRTTKRTSQEEFYKFIKPILEKMDGAEELLAKLNREDLLRKQRTFDNGSIPHQIHLGELHAILRRQEEFYPFLKDNREKIEKILTFRIPYYVGPLARGNSRFAWMTRKSDEAITPWNFEEVVDKGASAQSFIERMTNFDEYLPNKKVLPKHSLLYEYFTVYNELTKVKYVTEGMRKPEFLSGEQKEAIVDLLFKTNRKVTVKQLKEDYFKKIECFDSVEIIGVEDRFNASLGTYHDLLKIIKDKDFLDNEENEDILEDIVLTLTLFEDREMIEERLKKYANLFDDKVMKQLKRRHYTGWGRLSRKMINGIRDKQSGKTILDFLKSDGFSNRNFMQLIHDDSLTFKEEIEKAQVSGQGDSLHEQIADLAGSPAIKKGILQTVKIVDELVKVMGHKPENIVIEMARENQTTTKGLQQSRERKKRIEEGIKELESQILKENPVENTQLQNEKLYLYYLQNGRDMYVDQELDINRLSDYDVDAIVPQSFIKDDSIDNKVLTRSVENRGKSDNVPSEEVVKKMKNYWRQLLNAKLITQRKFDNLTKAERGGLSEADKAGFIKRQLVETRQITKHVARILDSRMNTKRDKNDKPIREVKVITLKSKLVSDFRKDFQLYKVRDINNYHHAHDAYLNAVVGTALIKKYPKLESEFVYGDYKVYDVRKMIAKSEQEIGKATAKRFFYSNIMNFFKTEVKLANGEIRKRPLIETNGETGEVVWNKEKDFATVRKVLAMPQVNIVKKTEVQTGGFSKESILSKRESAKLIPRKKGWDTRKYGGFGSPTVAYSILVVAKVEKGKAKKLKSVKVLVGITIMEKGSYEKDPIGFLEAKGYKDIKKELIFKLPKYSLFELENGRRRMLASATELQKANELVLPQHLVRLLYYTQNISATTGSNNLGYIEQHREEFKEIFEKIIDFSEKYILKNKVNSNLKSSFDEQFAVSDSILLSNSFVSLLKYTSFGASGGFTFLDLDVKQGRLRYQTVTEVLDATLIYQSITGLYETRTDLSQLGGDSGGSKRTADGSEFESPKKKRKVHHHHHH

SEQ ID NO: 442 - protein, 1513 aa, Artificial Sequence
  dCasFok, SV40+bipartiteSV40, ancestral mutations in RuvC+REC1/2 domain, HNH deletion D4682
  misc_feature: synthetic
MAVTPKKKRKVGGSGSQLVKSELEEKKSELRHKLKYVPHEYIELIEIARNSTQDRILEMKVMEFFMKVYGYRGKHLGGSRKPDGAIYTVGSPIDYGVIVDTKAYSGGYNLPIGQADEMQRYVEENQTRNKHINPNEWWKVYPSSVTEFKFLFVSGHFKGNYKAQLTRLNHITNCNGAVLSVEELLIGGEMIKAGTLTLEEVRRKFNNGEINFSGSETPGTSESATPESMDKKYSIGLAIGTNSVGWAVITDDYKVPSKKMKVLGNTDRQSIKKNLIGALLFDSGETAEATRLKRTARRRYTRRKNRICYLQEIFANEMAKLDDSFFHRLEESFLVEEDKKHERHPIFGNLVDEVAYHENYPTIYHLRKKLADSTEKADLRLIYLALAHMIKFRGHFLIEGDLNAENSDVDKLFIQLVQTYNQLFEENPINESGVDAKAILSARLSKSRRLENLIAQFPGEKKNGLFGNIIALALGLTPNFKSNFDLTEDAKLQLSKDTYDDDLDELLGQIGDQYADLFLAAKNLSDAILLSDILRVNSEITKAPLSASMVKRYDEHHQDLALLKTLVRQQLPEKYKEIFSDQSKNGYAGYIDIGIKHRKRTTKRTSQEEFYKFIKPILEKMDGAEELLAKLNREDLLRKQRTFDNGSIPHQIHLGELHAILRRQEEFYPFLKDNREKIEKILTFRIPYYVGPLARGNSRFAWMTRKSDEAITPWNFEEVVDKGASAQSFIERMTNFDEYLPNKKVLPKHSLLYEYFTVYNELTKVKYVTEGMRKPEFLSGEQKEAIVDLLFKTNRKVTVKQLKEDYFKKIECFDSVEIIGVEDRFNASLGTYHDLLKIIKDKDFLDNEENEDILEDIVLTLTLFEDREMIEERLKKYANLFDDKVMKQLKRRHYTGWGRLSRKMINGIRDKQSGKTILDFLKSDGFSNRNFMQLIHDDSLTFKEEIEKAQVSGQGDSLHEQIADLAGSPAIKKGILQTVKIVDELVKVMGHKPENIVIEMARENQTTTKGLQQSRERKKRGGSAGGTGGSGGLSEADKAGFIKRQLVETRQITKHVARILDSRMNTKRDKNDKPIREVKVITLKSKLVSDFRKDFQLYKVRDINNYHHAHDAYLNAVVGTALIKKYPKLESEFVYGDYKVYDVRKMIAKSEQEIGKATAKRFFYSNIMNFFKTEVKLANGEIRKRPLIETNGETGEVVWNKEKDFATVRKVLAMPQVNIVKKTEVQTGGFSKESILSKRESAKLIPRKKGWDTRKYGGFGSPTVAYSILVVAKVEKGKAKKLKSVKVLVGITIMEKGSYEKDPIGFLEAKGYKDIKKELIFKLPKYSLFELENGRRRMLASATELQKANELVLPQHLVRLLYYTQNISATTGSNNLGYIEQHREEFKEIFEKIIDFSEKYILKNKVNSNLKSSFDEQFAVSDSILLSNSFVSLLKYTSFGASGGFTFLDLDVKQGRLRYQTVTEVLDATLIYQSITGLYETRTDLSQLGGDSGGSKRTADGSEFESPKKKRKV

SEQ ID NO: 443 - protein, 1519 aa, Artificial Sequence
  dCasFok, SV40+bipartiteSV40, ancestral mutations in RuvC+REC1/2 domain, HNH deletion, 6His tag D4683
  misc_feature: synthetic
MAVTPKKKRKVGGSGSQLVKSELEEKKSELRHKLKYVPHEYIELIEIARNSTQDRILEMKVMEFFMKVYGYRGKHLGGSRKPDGAIYTVGSPIDYGVIVDTKAYSGGYNLPIGQADEMQRYVEENQTRNKHINPNEWWKVYPSSVTEFKFLFVSGHFKGNYKAQLTRLNHITNCNGAVLSVEELLIGGEMIKAGTLTLEEVRRKFNNGEINFSGSETPGTSESATPESMDKKYSIGLAIGTNSVGWAVITDDYKVPSKKMKVLGNTDRQSIKKNLIGALLFDSGETAEATRLKRTARRRYTRRKNRICYLQEIFANEMAKLDDSFFHRLEESFLVEEDKKHERHPIFGNLVDEVAYHENYPTIYHLRKKLADSTEKADLRLIYLALAHMIKFRGHFLIEGDLNAENSDVDKLFIQLVQTYNQLFEENPINESGVDAKAILSARLSKSRRLENLIAQFPGEKKNGLFGNIIALALGLTPNFKSNFDLTEDAKLQLSKDTYDDDLDELLGQIGDQYADLFLAAKNLSDAILLSDILRVNSEITKAPLSASMVKRYDEHHQDLALLKTLVRQQLPEKYKEIFSDQSKNGYAGYIDIGIKHRKRTTKRTSQEEFYKFIKPILEKMDGAEELLAKLNREDLLRKQRTFDNGSIPHQIHLGELHAILRRQEEFYPFLKDNREKIEKILTFRIPYYVGPLARGNSRFAWMTRKSDEAITPWNFEEVVDKGASAQSFIERMTNFDEYLPNKKVLPKHSLLYEYFTVYNELTKVKYVTEGMRKPEFLSGEQKEAIVDLLFKTNRKVTVKQLKEDYFKKIECFDSVEIIGVEDRFNASLGTYHDLLKIIKDKDFLDNEENEDILEDIVLTLTLFEDREMIEERLKKYANLFDDKVMKQLKRRHYTGWGRLSRKMINGIRDKQSGKTILDFLKSDGFSNRNFMQLIHDDSLTFKEEIEKAQVSGQGDSLHEQIADLAGSPAIKKGILQTVKIVDELVKVMGHKPENIVIEMARENQTTTKGLQQSRERKKRGGSAGGTGGSGGLSEADKAGFIKRQLVETRQITKHVARILDSRMNTKRDKNDKPIREVKVITLKSKLVSDFRKDFQLYKVRDINNYHHAHDAYLNAVVGTALIKKYPKLESEFVYGDYKVYDVRKMIAKSEQEIGKATAKRFFYSNIMNFFKTEVKLANGEIRKRPLIETNGETGEVVWNKEKDFATVRKVLAMPQVNIVKKTEVQTGGFSKESILSKRESAKLIPRKKGWDTRKYGGFGSPTVAYSILVVAKVEKGKAKKLKSVKVLVGITIMEKGSYEKDPIGFLEAKGYKDIKKELIFKLPKYSLFELENGRRRMLASATELQKANELVLPQHLVRLLYYTQNISATTGSNNLGYIEQHREEFKEIFEKIIDFSEKYILKNKVNSNLKSSFDEQFAVSDSILLSNSFVSLLKYTSFGASGGFTFLDLDVKQGRLRYQTVTEVLDATLIYQSITGLYETRTDLSQLGGDSGGSKRTADGSEFESPKKKRKVHHHHHH

SEQ ID NO: 444 - protein, 1625 aa, Artificial Sequence
  dCasFok, FokI consensus, SV40+bipartite SV40 D4732
  misc_feature: synthetic
MAVTPKKKRKVGGSGSQLVKSELEEKKSELRHKLKYLPHEYLELIDIARDPTQNRIFEMKTMELFMKVYGFRGEHLGGSRKPDGAIYTVGLPIDYGVIVDTKAYSGGYNLPIGQADEMQRYIEENQTRNKHINPNEWWKVFPSSITEFKFLFVSGHFKGNFKAQLTRLNHITNCNGAALNVEELLIGAEMIKAGTLTLEEVRRKFNNGEINFSGSETPGTSESATPESMEKKYSIGLAIGTNSVGWAVITDDYKVPSKKFKVLGNTNRKSIKKNLMGALLFDSGETAEATRLKRTARRRYTRRKNRIRYLQEIFANEMAKLDDSFFQRLEESFLVEEDKKNERHPIFGNLADEVAYHRNYPTIYHLRKKLADSPEKADLRLIYLALAHIIKFRGHFLIEGKLNAENSDVAKLFYQLIQTYNQLFEESPLDEIEVDAKGILSARLSKSKRLEKLIAVFPNEKKNGLFGNIIALALGLTPNFKSNFDLTEDAKLQLSKDTYDDDLDELLGQIGDQYADLFSAAKNLSDAILLSDILRSNSEVTKAPLSASMVKRYDEHHQDLALLKTLVRQQFPEKYAEIFKDDTKNGYAGYVGIGIKHRKRTTKLATQEEFYKFIKPILEKMDGAEELLAKLNRDDLLRKQRTFDNGSIPHQIHLKELHAILRRQEEFYPFLKENREKIEKILTFRIPYYVGPLARGNSRFAWLTRKSEEAITPWNFEEVVDKGASAQSFIERMTNFDEQLPNKKVLPKHSLLYEYFTVYNELTKVKYVTERMRKPEFLSGEQKKAIVDLLFKTNRKVTVKQLKEDYFKKIECFDSVEIIGVEDRFNASLGTYHDLLKIIKDKDFLDNEENEDILEDIVLTLTLFEDREMIEERLKTYAHLFDDKVMKQLKRRHYTGWGRLSRKMINGIRDKQSGKTILDFLKSDGFSNRNFMQLIHDDSLTFKEEIEKAQVSGQGDSLHEQIADLAGSPAIKKGILQTVKIVDELVKVMGHKPENIVIEMARENQTTTKGLQQSRERKKRIEEGIKELESQILKENPVENTQLQNEKLYLYYLQNGRDMYVDQELDINRLSDYDVDAIVPQSFIKDDSIDNKVLTRSVENRGKSDNVPSEEVVKKMKNYWRQLLNAKLITQRKFDNLTKAERGGLSEADKAGFIKRQLVETRQITKHVARILDSRMNTKRDKNDKPIREVKVITLKSKLVSDFRKDFQLYKVRDINNYHHAHDAYLNAVVGTALIKKYPKLESEFVYGDYKVYDVRKMIAKSEQEIGKATAKRFFYSNIMNFFKTEVKLANGEIRKRPLIETNGETGEVVWNKEKDFATVRKVLAMPQVNIVKKTEVQTGGFSKESILSKRESAKLIPRKKGWDTRKYGGFGSPTVAYSILVVAKVEKGKAKKLKSVKVLVGITIMEKGSYEKDPIGFLEAKGYKDIKKELIFKLPKYSLFELENGRRRMLASATELQKANELVLPQHLVRLLYYTQNISATTGSNNLGYIEQHREEFKEIFEKIIDFSEKYILKNKVNSNLKSSFDEQFAVSDSILLSNSFVSLLKYTSFGASGGFTFLDLDVKQGRLRYQTVTEVLDATLIYQSITGLYETRTDLSQLGGDSGGSKRTADGSEFESPKKKRKV

SEQ ID NO: 445 - protein, 1631 aa, Artificial Sequence
  dCasFok, FokI consensus, SV40+bipartiteSV40 D4733
  misc_feature: synthetic
MAVTPKKKRKVGGSGSQLVKSELEEKKSELRHKLKYLPHEYLELIDIARDPTQNRIFEMKTMELFMKVYGFRGEHLGGSRKPDGAIYTVGLPIDYGVIVDTKAYSGGYNLPIGQADEMQRYIEENQTRNKHINPNEWWKVFPSSITEFKFLFVSGHFKGNFKAQLTRLNHITNCNGAALNVEELLIGAEMIKAGTLTLEEVRRKFNNGEINFSGSETPGTSESATPESMEKKYSIGLAIGTNSVGWAVITDDYKVPSKKFKVLGNTNRKSIKKNLMGALLFDSGETAEATRLKRTARRRYTRRKNRIRYLQEIFANEMAKLDDSFFQRLEESFLVEEDKKNERHPIFGNLADEVAYHRNYPTIYHLRKKLADSPEKADLRLIYLALAHIIKFRGHFLIEGKLNAENSDVAKLFYQLIQTYNQLFEESPLDEIEVDAKGILSARLSKSKRLEKLIAVFPNEKKNGLFGNIIALALGLTPNFKSNFDLTEDAKLQLSKDTYDDDLDELLGQIGDQYADLFSAAKNLSDAILLSDILRSNSEVTKAPLSASMVKRYDEHHQDLALLKTLVRQQFPEKYAEIFKDDTKNGYAGYVGIGIKHRKRTTKLATQEEFYKFIKPILEKMDGAEELLAKLNRDDLLRKQRTFDNGSIPHQIHLKELHAILRRQEEFYPFLKENREKIEKILTFRIPYYVGPLARGNSRFAWLTRKSEEAITPWNFEEVVDKGASAQSFIERMTNFDEQLPNKKVLPKHSLLYEYFTVYNELTKVKYVTERMRKPEFLSGEQKKAIVDLLFKTNRKVTVKQLKEDYFKKIECFDSVEIIGVEDRFNASLGTYHDLLKIIKDKDFLDNEENEDILEDIVLTLTLFEDREMIEERLKTYAHLFDDKVMKQLKRRHYTGWGRLSRKMINGIRDKQSGKTILDFLKSDGFSNRNFMQLIHDDSLTFKEEIEKAQVSGQGDSLHEQIADLAGSPAIKKGILQTVKIVDELVKVMGHKPENIVIEMARENQTTTKGLQQSRERKKRIEEGIKELESQILKENPVENTQLQNEKLYLYYLQNGRDMYVDQELDINRLSDYDVDAIVPQSFIKDDSIDNKVLTRSVENRGKSDNVPSEEVVKKMKNYWRQLLNAKLITQRKFDNLTKAERGGLSEADKAGFIKRQLVETRQITKHVARILDSRMNTKRDKNDKPIREVKVITLKSKLVSDFRKDFQLYKVRDINNYHHAHDAYLNAVVGTALIKKYPKLESEFVYGDYKVYDVRKMIAKSEQEIGKATAKRFFYSNIMNFFKTEVKLANGEIRKRPLIETNGETGEVVWNKEKDFATVRKVLAMPQVNIVKKTEVQTGGFSKESILSKRESAKLIPRKKGWDTRKYGGFGSPTVAYSILVVAKVEKGKAKKLKSVKVLVGITIMEKGSYEKDPIGFLEAKGYKDIKKELIFKLPKYSLFELENGRRRMLASATELQKANELVLPQHLVRLLYYTQNISATTGSNNLGYIEQHREEFKEIFEKIIDFSEKYILKNKVNSNLKSSFDEQFAVSDSILLSNSFVSLLKYTSFGASGGFTFLDLDVKQGRLRYQTVTEVLDATLIYQSITGLYETRTDLSQLGGDSGGSKRTADGSEFESPKKKRKVHHHHHH

SEQ ID NO: 446 - protein, 1625 aa, Artificial Sequence
  dCasFok, FokI consensus, SV40+bipartiteSV40, ancestral mutations in RuvC+REC1/2 domain, D4736
  misc_feature: synthetic
MAVTPKKKRKVGGSGSQLVKSELEEKKSELRHKLKYLPHEYLELIDIARDPTQNRIFEMKTMELFMKVYGFRGEHLGGSRKPDGAIYTVGLPIDYGVIVDTKAYSGGYNLPIGQADEMQRYIEENQTRNKHINPNEWWKVFPSSITEFKFLFVSGHFKGNFKAQLTRLNHITNCNGAALNVEELLIGAEMIKAGTLTLEEVRRKFNNGEINFSGSETPGTSESATPESMDKKYSIGLAIGTNSVGWAVITDDYKVPSKKMKVLGNTDRQSIKKNLIGALLFDSGETAEATRLKRTARRRYTRRKNRICYLQEIFANEMAKLDDSFFHRLEESFLVEEDKKHERHPIFGNLVDEVAYHENYPTIYHLRKKLADSTEKADLRLIYLALAHMIKFRGHFLIEGDLNAENSDVDKLFIQLVQTYNQLFEENPINESGVDAKAILSARLSKSRRLENLIAQFPGEKKNGLFGNIIALALGLTPNFKSNFDLTEDAKLQLSKDTYDDDLDELLGQIGDQYADLFLAAKNLSDAILLSDILRVNSEITKAPLSASMVKRYDEHHQDLALLKTLVRQQLPEKYKEIFSDQSKNGYAGYIDIGIKHRKRTTKRTSQEEFYKFIKPILEKMDGAEELLAKLNREDLLRKQRTFDNGSIPHQIHLGELHAILRRQEEFYPFLKDNREKIEKILTFRIPYYVGPLARGNSRFAWMTRKSDEAITPWNFEEVVDKGASAQSFIERMTNFDEYLPNKKVLPKHSLLYEYFTVYNELTKVKYVTEGMRKPEFLSGEQKEAIVDLLFKTNRKVTVKQLKEDYFKKIECFDSVEIIGVEDRFNASLGTYHDLLKIIKDKDFLDNEENEDILEDIVLTLTLFEDREMIEERLKKYANLFDDKVMKQLKRRHYTGWGRLSRKMINGIRDKQSGKTILDFLKSDGFSNRNFMQLIHDDSLTFKEEIEKAQVSGQGDSLHEQIADLAGSPAIKKGILQTVKIVDELVKVMGHKPENIVIEMARENQTTTKGLQQSRERKKRIEEGIKELESQILKENPVENTQLQNEKLYLYYLQNGRDMYVDQELDINRLSDYDVDAIVPQSFIKDDSIDNKVLTRSVENRGKSDNVPSEEVVKKMKNYWRQLLNAKLITQRKFDNLTKAERGGLSEADKAGFIKRQLVETRQITKHVARILDSRMNTKRDKNDKPIREVKVITLKSKLVSDFRKDFQLYKVRDINNYHHAHDAYLNAVVGTALIKKYPKLESEFVYGDYKVYDVRKMIAKSEQEIGKATAKRFFYSNIMNFFKTEVKLANGEIRKRPLIETNGETGEVVWNKEKDFATVRKVLAMPQVNIVKKTEVQTGGFSKESILSKRESAKLIPRKKGWDTRKYGGFGSPTVAYSILVVAKVEKGKAKKLKSVKVLVGITIMEKGSYEKDPIGFLEAKGYKDIKKELIFKLPKYSLFELENGRRRMLASATELQKANELVLPQHLVRLLYYTQNISATTGSNNLGYIEQHREEFKEIFEKIIDFSEKYILKNKVNSNLKSSFDEQFAVSDSILLSNSFVSLLKYTSFGASGGFTFLDLDVKQGRLRYQTVTEVLDATLIYQSITGLYETRTDLSQLGGDSGGSKRTADGSEFESPKKKRKV

SEQ ID NO: 447 - protein, 1631 aa, Artificial Sequence
  dCasFok, FokI consensus, SV40+bipartiteSV40, ancestral mutations in RuvC+REC1/2 domain, 6His tag D4737
  misc_feature: synthetic
MAVTPKKKRKVGGSGSQLVKSELEEKKSELRHKLKYLPHEYLELIDIARDPTQNRIFEMKTMELFMKVYGFRGEHLGGSRKPDGAIYTVGLPIDYGVIVDTKAYSGGYNLPIGQADEMQRYIEENQTRNKHINPNEWWKVFPSSITEFKFLFVSGHFKGNFKAQLTRLNHITNCNGAALNVEELLIGAEMIKAGTLTLEEVRRKFNNGEINFSGSETPGTSESATPESMDKKYSIGLAIGTNSVGWAVITDDYKVPSKKMKVLGNTDRQSIKKNLIGALLFDSGETAEATRLKRTARRRYTRRKNRICYLQEIFANEMAKLDDSFFHRLEESFLVEEDKKHERHPIFGNLVDEVAYHENYPTIYHLRKKLADSTEKADLRLIYLALAHMIKFRGHFLIEGDLNAENSDVDKLFIQLVQTYNQLFEENPINESGVDAKAILSARLSKSRRLENLIAQFPGEKKNGLFGNIIALALGLTPNFKSNFDLTEDAKLQLSKDTYDDDLDELLGQIGDQYADLFLAAKNLSDAILLSDILRVNSEITKAPLSASMVKRYDEHHQDLALLKTLVRQQLPEKYKEIFSDQSKNGYAGYIDIGIKHRKRTTKRTSQEEFYKFIKPILEKMDGAEELLAKLNREDLLRKQRTFDNGSIPHQIHLGELHAILRRQEEFYPFLKDNREKIEKILTFRIPYYVGPLARGNSRFAWMTRKSDEAITPWNFEEVVDKGASAQSFIERMTNFDEYLPNKKVLPKHSLLYEYFTVYNELTKVKYVTEGMRKPEFLSGEQKEAIVDLLFKTNRKVTVKQLKEDYFKKIECFDSVEIIGVEDRFNASLGTYHDLLKIIKDKDFLDNEENEDILEDIVLTLTLFEDREMIEERLKKYANLFDDKVMKQLKRRHYTGWGRLSRKMINGIRDKQSGKTILDFLKSDGFSNRNFMQLIHDDSLTFKEEIEKAQVSGQGDSLHEQIADLAGSPAIKKGILQTVKIVDELVKVMGHKPENIVIEMARENQTTTKGLQQSRERKKRIEEGIKELESQILKENPVENTQLQNEKLYLYYLQNGRDMYVDQELDINRLSDYDVDAIVPQSFIKDDSIDNKVLTRSVENRGKSDNVPSEEVVKKMKNYWRQLLNAKLITQRKFDNLTKAERGGLSEADKAGFIKRQLVETRQITKHVARILDSRMNTKRDKNDKPIREVKVITLKSKLVSDFRKDFQLYKVRDINNYHHAHDAYLNAVVGTALIKKYPKLESEFVYGDYKVYDVRKMIAKSEQEIGKATAKRFFYSNIMNFFKTEVKLANGEIRKRPLIETNGETGEVVWNKEKDFATVRKVLAMPQVNIVKKTEVQTGGFSKESILSKRESAKLIPRKKGWDTRKYGGFGSPTVAYSILVVAKVEKGKAKKLKSVKVLVGITIMEKGSYEKDPIGFLEAKGYKDIKKELIFKLPKYSLFELENGRRRMLASATELQKANELVLPQHLVRLLYYTQNISATTGSNNLGYIEQHREEFKEIFEKIIDFSEKYILKNKVNSNLKSSFDEQFAVSDSILLSNSFVSLLKYTSFGASGGFTFLDLDVKQGRLRYQTVTEVLDATLIYQSITGLYETRTDLSQLGGDSGGSKRTADGSEFESPKKKRKVHHHHHH

SEQ ID NO: 448 - protein, 1513 aa, Artificial Sequence
  dCasFok, FokI consensus, SV40+bipartiteSV40, ancestral mutations in RuvC+REC1/2 domain, HNH deletion longer linkers D4740
  misc_feature: synthetic
MAVTPKKKRKVGGSGSQLVKSELEEKKSELRHKLKYLPHEYLELIDIARDPTQNRIFEMKTMELFMKVYGFRGEHLGGSRKPDGAIYTVGLPIDYGVIVDTKAYSGGYNLPIGQADEMQRYIEENQTRNKHINPNEWWKVFPSSITEFKFLFVSGHFKGNFKAQLTRLNHITNCNGAALNVEELLIGAEMIKAGTLTLEEVRRKFNNGEINFSGSETPGTSESATPESMDKKYSIGLAIGTNSVGWAVITDDYKVPSKKMKVLGNTDRQSIKKNLIGALLFDSGETAEATRLKRTARRRYTRRKNRICYLQEIFANEMAKLDDSFFHRLEESFLVEEDKKHERHPIFGNLVDEVAYHENYPTIYHLRKKLADSTEKADLRLIYLALAHMIKFRGHFLIEGDLNAENSDVDKLFIQLVQTYNQLFEENPINESGVDAKAILSARLSKSRRLENLIAQFPGEKKNGLFGNIIALALGLTPNFKSNFDLTEDAKLQLSKDTYDDDLDELLGQIGDQYADLFLAAKNLSDAILLSDILRVNSEITKAPLSASMVKRYDEHHQDLALLKTLVRQQLPEKYKEIFSDQSKNGYAGYIDIGIKHRKRTTKRTSQEEFYKFIKPILEKMDGAEELLAKLNREDLLRKQRTFDNGSIPHQIHLGELHAILRRQEEFYPFLKDNREKIEKILTFRIPYYVGPLARGNSRFAWMTRKSDEAITPWNFEEVVDKGASAQSFIERMTNFDEYLPNKKVLPKHSLLYEYFTVYNELTKVKYVTEGMRKPEFLSGEQKEAIVDLLFKTNRKVTVKQLKEDYFKKIECFDSVEIIGVEDRFNASLGTYHDLLKIIKDKDFLDNEENEDILEDIVLTLTLFEDREMIEERLKKYANLFDDKVMKQLKRRHYTGWGRLSRKMINGIRDKQSGKTILDFLKSDGFSNRNFMQLIHDDSLTFKEEIEKAQVSGQGDSLHEQIADLAGSPAIKKGILQTVKIVDELVKVMGHKPENIVIEMARENQTTTKGLQQSRERKKRGGSAGGTGGSGGLSEADKAGFIKRQLVETRQITKHVARILDSRMNTKRDKNDKPIREVKVITLKSKLVSDFRKDFQLYKVRDINNYHHAHDAYLNAVVGTALIKKYPKLESEFVYGDYKVYDVRKMIAKSEQEIGKATAKRFFYSNIMNFFKTEVKLANGEIRKRPLIETNGETGEVVWNKEKDFATVRKVLAMPQVNIVKKTEVQTGGFSKESILSKRESAKLIPRKKGWDTRKYGGFGSPTVAYSILVVAKVEKGKAKKLKSVKVLVGITIMEKGSYEKDPIGFLEAKGYKDIKKELIFKLPKYSLFELENGRRRMLASATELQKANELVLPQHLVRLLYYTQNISATTGSNNLGYIEQHREEFKEIFEKIIDFSEKYILKNKVNSNLKSSFDEQFAVSDSILLSNSFVSLLKYTSFGASGGFTFLDLDVKQGRLRYQTVTEVLDATLIYQSITGLYETRTDLSQLGGDSGGSKRTADGSEFESPKKKRKV

SEQ ID NO: 449 - protein, 1519 aa, Artificial Sequence
  dCasFok, FokI consensus, SV40+bipartiteSV40, ancestral mutations in RuvC+REC1/2 domain, HNH deletion longer linkers, 6His tag D4741
  misc_feature: synthetic
MAVTPKKKRKVGGSGSQLVKSELEEKKSELRHKLKYLPHEYLELIDIARDPTQNRIFEMKTMELFMKVYGFRGEHLGGSRKPDGAIYTVGLPIDYGVIVDTKAYSGGYNLPIGQADEMQRYIEENQTRNKHINPNEWWKVFPSSITEFKFLFVSGHFKGNFKAQLTRLNHITNCNGAALNVEELLIGAEMIKAGTLTLEEVRRKFNNGEINFSGSETPGTSESATPESMDKKYSIGLAIGTNSVGWAVITDDYKVPSKKMKVLGNTDRQSIKKNLIGALLFDSGETAEATRLKRTARRRYTRRKNRICYLQEIFANEMAKLDDSFFHRLEESFLVEEDKKHERHPIFGNLVDEVAYHENYPTIYHLRKKLADSTEKADLRLIYLALAHMIKFRGHFLIEGDLNAENSDVDKLFIQLVQTYNQLFEENPINESGVDAKAILSARLSKSRRLENLIAQFPGEKKNGLFGNIIALALGLTPNFKSNFDLTEDAKLQLSKDTYDDDLDELLGQIGDQYADLFLAAKNLSDAILLSDILRVNSEITKAPLSASMVKRYDEHHQDLALLKTLVRQQLPEKYKEIFSDQSKNGYAGYIDIGIKHRKRTTKRTSQEEFYKFIKPILEKMDGAEELLAKLNREDLLRKQRTFDNGSIPHQIHLGELHAILRRQEEFYPFLKDNREKIEKILTFRIPYYVGPLARGNSRFAWMTRKSDEAITPWNFEEVVDKGASAQSFIERMTNFDEYLPNKKVLPKHSLLYEYFTVYNELTKVKYVTEGMRKPEFLSGEQKEAIVDLLFKTNRKVTVKQLKEDYFKKIECFDSVEIIGVEDRFNASLGTYHDLLKIIKDKDFLDNEENEDILEDIVLTLTLFEDREMIEERLKKYANLFDDKVMKQLKRRHYTGWGRLSRKMINGIRDKQSGKTILDFLKSDGFSNRNFMQLIHDDSLTFKEEIEKAQVSGQGDSLHEQIADLAGSPAIKKGILQTVKIVDELVKVMGHKPENIVIEMARENQTTTKGLQQSRERKKRGGSAGGTGGSGGLSEADKAGFIKRQLVETRQITKHVARILDSRMNTKRDKNDKPIREVKVITLKSKLVSDFRKDFQLYKVRDINNYHHAHDAYLNAVVGTALIKKYPKLESEFVYGDYKVYDVRKMIAKSEQEIGKATAKRFFYSNIMNFFKTEVKLANGEIRKRPLIETNGETGEVVWNKEKDFATVRKVLAMPQVNIVKKTEVQTGGFSKESILSKRESAKLIPRKKGWDTRKYGGFGSPTVAYSILVVAKVEKGKAKKLKSVKVLVGITIMEKGSYEKDPIGFLEAKGYKDIKKELIFKLPKYSLFELENGRRRMLASATELQKANELVLPQHLVRLLYYTQNISATTGSNNLGYIEQHREEFKEIFEKIIDFSEKYILKNKVNSNLKSSFDEQFAVSDSILLSNSFVSLLKYTSFGASGGFTFLDLDVKQGRLRYQTVTEVLDATLIYQSITGLYETRTDLSQLGGDSGGSKRTADGSEFESPKKKRKVHHHHHH

SEQ ID NO: 450 - protein, 1615 aa, Artificial Sequence
  dScCasFok, SV40+bipartiteSV40, ancestral mutations, Scloop deletion D4694
  misc_feature: synthetic
MAVTPKKKRKVGGSGSQLVKSELEEKKSELRHKLKYVPHEYIELIEIARNSTQDRILEMKVMEFFMKVYGYRGKHLGGSRKPDGAIYTVGSPIDYGVIVDTKAYSGGYNLPIGQADEMQRYVEENQTRNKHINPNEWWKVYPSSVTEFKFLFVSGHFKGNYKAQLTRLNHITNCNGAVLSVEELLIGGEMIKAGTLTLEEVRRKFNNGEINFSGSETPGTSESATPESMDKKYSIGLAIGTNSVGWAVITDDYKVPSKKMKVLGNTDRQSIKKNLIGALLFDSGETAEATRLKRTARRRYTRRKNRICYLQEIFANEMAKLDDSFFHRLEESFLVEEDKKHERHPIFGNLVDEVAYHENYPTIYHLRKKLADSTEKADLRLIYLALAHMIKFRGHFLIEGDLNAENSDVDKLFIQLVQTYNQLFEENPINESGVDAKAILSARLSKSRRLENLIAQFPGEKKNGLFGNIIALALGLTPNFKSNFDLTEDAKLQLSKDTYDDDLDELLGQIGDQYADLFLAAKNLSDAILLSDILRVNSEITKAPLSASMVKRYDEHHQDLALLKTLVRQQLPEKYKEIFSDQSKNGYAGYIDIGTSQEEFYKFIKPILEKMDGAEELLAKLNREDLLRKQRTFDNGSIPHQIHLGELHAILRRQEEFYPFLKDNREKIEKILTFRIPYYVGPLARGNSRFAWMTRKSDEAITPWNFEEVVDKGASAQSFIERMTNFDEYLPNKKVLPKHSLLYEYFTVYNELTKVKYVTEGMRKPEFLSGEQKEAIVDLLFKTNRKVTVKQLKEDYFKKIECFDSVEIIGVEDRFNASLGTYHDLLKIIKDKDFLDNEENEDILEDIVLTLTLFEDREMIEERLKKYANLFDDKVMKQLKRRHYTGWGRLSRKMINGIRDKQSGKTILDFLKSDGFSNRNFMQLIHDDSLTFKEEIEKAQVSGQGDSLHEQIADLAGSPAIKKGILQTVKIVDELVKVMGHKPENIVIEMARENQTTTKGLQQSRERKKRIEEGIKELESQILKENPVENTQLQNEKLYLYYLQNGRDMYVDQELDINRLSDYDVDAIVPQSFIKDDSIDNKVLTRSVENRGKSDNVPSEEVVKKMKNYWRQLLNAKLITQRKFDNLTKAERGGLSEADKAGFIKRQLVETRQITKHVARILDSRMNTKRDKNDKPIREVKVITLKSKLVSDFRKDFQLYKVRDINNYHHAHDAYLNAVVGTALIKKYPKLESEFVYGDYKVYDVRKMIAKSEQEIGKATAKRFFYSNIMNFFKTEVKLANGEIRKRPLIETNGETGEVVWNKEKDFATVRKVLAMPQVNIVKKTEVQTGGFSKESILSKRESAKLIPRKKGWDTRKYGGFGSPTVAYSILVVAKVEKGKAKKLKSVKVLVGITIMEKGSYEKDPIGFLEAKGYKDIKKELIFKLPKYSLFELENGRRRMLASATELQKANELVLPQHLVRLLYYTQNISATTGSNNLGYIEQHREEFKEIFEKIIDFSEKYILKNKVNSNLKSSFDEQFAVSDSILLSNSFVSLLKYTSFGASGGFTFLDLDVKQGRLRYQTVTEVLDATLIYQSITGLYETRTDLSQLGGDSGGSKRTADGSEFESPKKKRKV

SEQ ID NO: 451 - protein, 1621 aa, Artificial Sequence
  dScCasFok, SV40+bipartiteSV40, ancestral mutations, Scloop deletion, 6His tag D4695
  misc_feature: synthetic
MAVTPKKKRKVGGSGSQLVKSELEEKKSELRHKLKYVPHEYIELIEIARNSTQDRILEMKVMEFFMKVYGYRGKHLGGSRKPDGAIYTVGSPIDYGVIVDTKAYSGGYNLPIGQADEMQRYVEENQTRNKHINPNEWWKVYPSSVTEFKFLFVSGHFKGNYKAQLTRLNHITNCNGAVLSVEELLIGGEMIKAGTLTLEEVRRKFNNGEINFSGSETPGTSESATPESMDKKYSIGLAIGTNSVGWAVITDDYKVPSKKMKVLGNTDRQSIKKNLIGALLFDSGETAEATRLKRTARRRYTRRKNRICYLQEIFANEMAKLDDSFFHRLEESFLVEEDKKHERHPIFGNLVDEVAYHENYPTIYHLRKKLADSTEKADLRLIYLALAHMIKFRGHFLIEGDLNAENSDVDKLFIQLVQTYNQLFEENPINESGVDAKAILSARLSKSRRLENLIAQFPGEKKNGLFGNIIALALGLTPNFKSNFDLTEDAKLQLSKDTYDDDLDELLGQIGDQYADLFLAAKNLSDAILLSDILRVNSEITKAPLSASMVKRYDEHHQDLALLKTLVRQQLPEKYKEIFSDQSKNGYAGYIDIGTSQEEFYKFIKPILEKMDGAEELLAKLNREDLLRKQRTFDNGSIPHQIHLGELHAILRRQEEFYPFLKDNREKIEKILTFRIPYYVGPLARGNSRFAWMTRKSDEAITPWNFEEVVDKGASAQSFIERMTNFDEYLPNKKVLPKHSLLYEYFTVYNELTKVKYVTEGMRKPEFLSGEQKEAIVDLLFKTNRKVTVKQLKEDYFKKIECFDSVEIIGVEDRFNASLGTYHDLLKIIKDKDFLDNEENEDILEDIVLTLTLFEDREMIEERLKKYANLFDDKVMKQLKRRHYTGWGRLSRKMINGIRDKQSGKTILDFLKSDGFSNRNFMQLIHDDSLTFKEEIEKAQVSGQGDSLHEQIADLAGSPAIKKGILQTVKIVDELVKVMGHKPENIVIEMARENQTTTKGLQQSRERKKRIEEGIKELESQILKENPVENTQLQNEKLYLYYLQNGRDMYVDQELDINRLSDYDVDAIVPQSFIKDDSIDNKVLTRSVENRGKSDNVPSEEVVKKMKNYWRQLLNAKLITQRKFDNLTKAERGGLSEADKAGFIKRQLVETRQITKHVARILDSRMNTKRDKNDKPIREVKVITLKSKLVSDFRKDFQLYKVRDINNYHHAHDAYLNAVVGTALIKKYPKLESEFVYGDYKVYDVRKMIAKSEQEIGKATAKRFFYSNIMNFFKTEVKLANGEIRKRPLIETNGETGEVVWNKEKDFATVRKVLAMPQVNIVKKTEVQTGGFSKESILSKRESAKLIPRKKGWDTRKYGGFGSPTVAYSILVVAKVEKGKAKKLKSVKVLVGITIMEKGSYEKDPIGFLEAKGYKDIKKELIFKLPKYSLFELENGRRRMLASATELQKANELVLPQHLVRLLYYTQNISATTGSNNLGYIEQHREEFKEIFEKIIDFSEKYILKNKVNSNLKSSFDEQFAVSDSILLSNSFVSLLKYTSFGASGGFTFLDLDVKQGRLRYQTVTEVLDATLIYQSITGLYETRTDLSQLGGDSGGSKRTADGSEFESPKKKRKVHHHHHH

SEQ ID NO: 452 - protein, 1503 aa, Artificial Sequence
  dScCasFok, SV40+bipartiteSV40, ancestral mutations, Scloop deletion, HNHdeletion D4696
  misc_feature: synthetic
MAVTPKKKRKVGGSGSQLVKSELEEKKSELRHKLKYVPHEYIELIEIARNSTQDRILEMKVMEFFMKVYGYRGKHLGGSRKPDGAIYTVGSPIDYGVIVDTKAYSGGYNLPIGQADEMQRYVEENQTRNKHINPNEWWKVYPSSVTEFKFLFVSGHFKGNYKAQLTRLNHITNCNGAVLSVEELLIGGEMIKAGTLTLEEVRRKFNNGEINFSGSETPGTSESATPESMDKKYSIGLAIGTNSVGWAVITDDYKVPSKKMKVLGNTDRQSIKKNLIGALLFDSGETAEATRLKRTARRRYTRRKNRICYLQEIFANEMAKLDDSFFHRLEESFLVEEDKKHERHPIFGNLVDEVAYHENYPTIYHLRKKLADSTEKADLRLIYLALAHMIKFRGHFLIEGDLNAENSDVDKLFIQLVQTYNQLFEENPINESGVDAKAILSARLSKSRRLENLIAQFPGEKKNGLFGNIIALALGLTPNFKSNFDLTEDAKLQLSKDTYDDDLDELLGQIGDQYADLFLAAKNLSDAILLSDILRVNSEITKAPLSASMVKRYDEHHQDLALLKTLVRQQLPEKYKEIFSDQSKNGYAGYIDIGTSQEEFYKFIKPILEKMDGAEELLAKLNREDLLRKQRTFDNGSIPHQIHLGELHAILRRQEEFYPFLKDNREKIEKILTFRIPYYVGPLARGNSRFAWMTRKSDEAITPWNFEEVVDKGASAQSFIERMTNFDEYLPNKKVLPKHSLLYEYFTVYNELTKVKYVTEGMRKPEFLSGEQKEAIVDLLFKTNRKVTVKQLKEDYFKKIECFDSVEIIGVEDRFNASLGTYHDLLKIIKDKDFLDNEENEDILEDIVLTLTLFEDREMIEERLKKYANLFDDKVMKQLKRRHYTGWGRLSRKMINGIRDKQSGKTILDFLKSDGFSNRNFMQLIHDDSLTFKEEIEKAQVSGQGDSLHEQIADLAGSPAIKKGILQTVKIVDELVKVMGHKPENIVIEMARENQTTTKGLQQSRERKKRGGSAGGTGGSGGLSEADKAGFIKRQLVETRQITKHVARILDSRMNTKRDKNDKPIREVKVITLKSKLVSDFRKDFQLYKVRDINNYHHAHDAYLNAVVGTALIKKYPKLESEFVYGDYKVYDVRKMIAKSEQEIGKATAKRFFYSNIMNFFKTEVKLANGEIRKRPLIETNGETGEVVWNKEKDFATVRKVLAMPQVNIVKKTEVQTGGFSKESILSKRESAKLIPRKKGWDTRKYGGFGSPTVAYSILVVAKVEKGKAKKLKSVKVLVGITIMEKGSYEKDPIGFLEAKGYKDIKKELIFKLPKYSLFELENGRRRMLASATELQKANELVLPQHLVRLLYYTQNISATTGSNNLGYIEQHREEFKEIFEKIIDFSEKYILKNKVNSNLKSSFDEQFAVSDSILLSNSFVSLLKYTSFGASGGFTFLDLDVKQGRLRYQTVTEVLDATLIYQSITGLYETRTDLSQLGGDSGGSKRTADGSEFESPKKKRKV

SEQ ID NO: 453 - protein, 1509 aa, Artificial Sequence
  dScCasFok, SV40+bipartiteSV40, ancestral mutations, Scloop deletion, HNHdeletion, 6His tag D4697
  misc_feature: synthetic
MAVTPKKKRKVGGSGSQLVKSELEEKKSELRHKLKYVPHEYIELIEIARNSTQDRILEMKVMEFFMKVYGYRGKHLGGSRKPDGAIYTVGSPIDYGVIVDTKAYSGGYNLPIGQADEMQRYVEENQTRNKHINPNEWWKVYPSSVTEFKFLFVSGHFKGNYKAQLTRLNHITNCNGAVLSVEELLIGGEMIKAGTLTLEEVRRKFNNGEINFSGSETPGTSESATPESMDKKYSIGLAIGTNSVGWAVITDDYKVPSKKMKVLGNTDRQSIKKNLIGALLFDSGETAEATRLKRTARRRYTRRKNRICYLQEIFANEMAKLDDSFFHRLEESFLVEEDKKHERHPIFGNLVDEVAYHENYPTIYHLRKKLADSTEKADLRLIYLALAHMIKFRGHFLIEGDLNAENSDVDKLFIQLVQTYNQLFEENPINESGVDAKAILSARLSKSRRLENLIAQFPGEKKNGLFGNIIALALGLTPNFKSNFDLTEDAKLQLSKDTYDDDLDELLGQIGDQYADLFLAAKNLSDAILLSDILRVNSEITKAPLSASMVKRYDEHHQDLALLKTLVRQQLPEKYKEIFSDQSKNGYAGYIDIGTSQEEFYKFIKPILEKMDGAEELLAKLNREDLLRKQRTFDNGSIPHQIHLGELHAILRRQEEFYPFLKDNREKIEKILTFRIPYYVGPLARGNSRFAWMTRKSDEAITPWNFEEVVDKGASAQSFIERMTNFDEYLPNKKVLPKHSLLYEYFTVYNELTKVKYVTEGMRKPEFLSGEQKEAIVDLLFKTNRKVTVKQLKEDYFKKIECFDSVEIIGVEDRFNASLGTYHDLLKIIKDKDFLDNEENEDILEDIVLTLTLFEDREMIEERLKKYANLFDDKVMKQLKRRHYTGWGRLSRKMINGIRDKQSGKTILDFLKSDGFSNRNFMQLIHDDSLTFKEEIEKAQVSGQGDSLHEQIADLAGSPAIKKGILQTVKIVDELVKVMGHKPENIVIEMARENQTTTKGLQQSRERKKRGGSAGGTGGSGGLSEADKAGFIKRQLVETRQITKHVARILDSRMNTKRDKNDKPIREVKVITLKSKLVSDFRKDFQLYKVRDINNYHHAHDAYLNAVVGTALIKKYPKLESEFVYGDYKVYDVRKMIAKSEQEIGKATAKRFFYSNIMNFFKTEVKLANGEIRKRPLIETNGETGEVVWNKEKDFATVRKVLAMPQVNIVKKTEVQTGGFSKESILSKRESAKLIPRKKGWDTRKYGGFGSPTVAYSILVVAKVEKGKAKKLKSVKVLVGITIMEKGSYEKDPIGFLEAKGYKDIKKELIFKLPKYSLFELENGRRRMLASATELQKANELVLPQHLVRLLYYTQNISATTGSNNLGYIEQHREEFKEIFEKIIDFSEKYILKNKVNSNLKSSFDEQFAVSDSILLSNSFVSLLKYTSFGASGGFTFLDLDVKQGRLRYQTVTEVLDATLIYQSITGLYETRTDLSQLGGDSGGSKRTADGSEFESPKKKRKVHHHHHH

SEQ ID NO: 454 - protein, 1509 aa, Artificial Sequence
  dScCasFok, SV40+bipartiteSV40, ancestral mutations, Scloop deletion, HNHdeletion, 6His tag D4698
  misc_feature: synthetic
MAVTPKKKRKVGGSGSQLVKSELEEKKSELRHKLKYVPHEYIELIEIARNSTQDRILEMKVMEFFMKVYGYRGKHLGGSRKPDGAIYTVGSPIDYGVIVDTKAYSGGYNLPIGQADEMQRYVEENQTRNKHINPNEWWKVYPSSVTEFKFLFVSGHFKGNYKAQLTRLNHITNCNGAVLSVEELLIGGEMIKAGTLTLEEVRRKFNNGEINFSGSETPGTSESATPESMDKKYSIGLAIGTNSVGWAVITDDYKVPSKKMKVLGNTDRQSIKKNLIGALLFDSGETAEATRLKRTARRRYTRRKNRICYLQEIFANEMAKLDDSFFHRLEESFLVEEDKKHERHPIFGNLVDEVAYHENYPTIYHLRKKLADSTEKADLRLIYLALAHMIKFRGHFLIEGDLNAENSDVDKLFIQLVQTYNQLFEENPINESGVDAKAILSARLSKSRRLENLIAQFPGEKKNGLFGNIIALALGLTPNFKSNFDLTEDAKLQLSKDTYDDDLDELLGQIGDQYADLFLAAKNLSDAILLSDILRVNSEITKAPLSASMVKRYDEHHQDLALLKTLVRQQFPEKYAEIFKDDTKNGYAGYVGIGATQEEFYKFIKPILEKMDGAEELLAKLNRDDLLRKQRTFDNGSIPHQIHLKELHAILRRQEEFYPFLKENREKIEKILTFRIPYYVGPLARGNSRFAWLTRKSEEAITPWNFEEVVDKGASAQSFIERMTNFDEYLPNKKVLPKHSLLYEYFTVYNELTKVKYVTEGMRKPEFLSGEQKEAIVDLLFKTNRKVTVKQLKEDYFKKIECFDSVEIIGVEDRFNASLGTYHDLLKIIKDKDFLDNEENEDILEDIVLTLTLFEDREMIEERLKKYANLFDDKVMKQLKRRHYTGWGRLSRKMINGIRDKQSGKTILDFLKSDGFSNRNFMQLIHDDSLTFKEEIEKAQVSGQGDSLHEQIADLAGSPAIKKGILQTVKIVDELVKVMGHKPENIVIEMARENQTTTKGLQQSRERKKRGGSAGGTGGSGGLSEADKAGFIKRQLVETRQITKHVARILDSRMNTKRDKNDKPIREVKVITLKSKLVSDFRKDFQLYKVRDINNYHHAHDAYLNAVVGTALIKKYPKLESEFVYGDYKVYDVRKMIAKSEQEIGKATAKRFFYSNIMNFFKTEVKLANGEIRKRPLIETNGETGEVVWNKEKDFATVRKVLAMPQVNIVKKTEVQTGGFSKESILSKRESAKLIPRKKGWDTRKYGGFGSPTVAYSILVVAKVEKGKAKKLKSVKVLVGITIMEKGSYEKDPIGFLEAKGYKDIKKELIFKLPKYSLFELENGRRRMLASATELQKANELVLPQHLVRLLYYTQNISATTGSNNLGYIEQHREEFKEIFEKIIDFSEKYILKNKVNSNLKSSFDEQFAVSDSILLSNSFVSLLKYTSFGASGGFTFLDLDVKQGRLRYQTVTEVLDATLIYQSITGLYETRTDLSQLGGDSGGSKRTADGSEFESPKKKRKVHHHHHH

SEQ ID NO: 455 - protein, 1519 aa, Artificial Sequence
  dScCasFok, SV40+bipartiteSV40, ancestral mutations, Scloop QQmutant, HNHdeletion, 6His tag D4699
  misc_feature: synthetic
MAVTPKKKRKVGGSGSQLVKSELEEKKSELRHKLKYVPHEYIELIEIARNSTQDRILEMKVMEFFMKVYGYRGKHLGGSRKPDGAIYTVGSPIDYGVIVDTKAYSGGYNLPIGQADEMQRYVEENQTRNKHINPNEWWKVYPSSVTEFKFLFVSGHFKGNYKAQLTRLNHITNCNGAVLSVEELLIGGEMIKAGTLTLEEVRRKFNNGEINFSGSETPGTSESATPESMDKKYSIGLAIGTNSVGWAVITDDYKVPSKKMKVLGNTDRQSIKKNLIGALLFDSGETAEATRLKRTARRRYTRRKNRICYLQEIFANEMAKLDDSFFHRLEESFLVEEDKKHERHPIFGNLVDEVAYHENYPTIYHLRKKLADSTEKADLRLIYLALAHMIKFRGHFLIEGDLNAENSDVDKLFIQLVQTYNQLFEENPINESGVDAKAILSARLSKSRRLENLIAQFPGEKKNGLFGNIIALALGLTPNFKSNFDLTEDAKLQLSKDTYDDDLDELLGQIGDQYADLFLAAKNLSDAILLSDILRVNSEITKAPLSASMVKRYDEHHQDLALLKTLVRQQFPEKYAEIFKDDTKNGYAGYVGIGIKHQKQTTKLATQEEFYKFIKPILEKMDGAEELLAKLNRDDLLRKQRTFDNGSIPHQIHLKELHAILRRQEEFYPFLKENREKIEKILTFRIPYYVGPLARGNSRFAWLTRKSEEAITPWNFEEVVDKGASAQSFIERMTNFDEYLPNKKVLPKHSLLYEYFTVYNELTKVKYVTEGMRKPEFLSGEQKEAIVDLLFKTNRKVTVKQLKEDYFKKIECFDSVEIIGVEDRFNASLGTYHDLLKIIKDKDFLDNEENEDILEDIVLTLTLFEDREMIEERLKKYANLFDDKVMKQLKRRHYTGWGRLSRKMINGIRDKQSGKTILDFLKSDGFSNRNFMQLIHDDSLTFKEEIEKAQVSGQGDSLHEQIADLAGSPAIKKGILQTVKIVDELVKVMGHKPENIVIEMARENQTTTKGLQQSRERKKRGGSAGGTGGSGGLSEADKAGFIKRQLVETRQITKHVARILDSRMNTKRDKNDKPIREVKVITLKSKLVSDFRKDFQLYKVRDINNYHHAHDAYLNAVVGTALIKKYPKLESEFVYGDYKVYDVRKMIAKSEQEIGKATAKRFFYSNIMNFFKTEVKLANGEIRKRPLIETNGETGEVVWNKEKDFATVRKVLAMPQVNIVKKTEVQTGGFSKESILSKRESAKLIPRKKGWDTRKYGGFGSPTVAYSILVVAKVEKGKAKKLKSVKVLVGITIMEKGSYEKDPIGFLEAKGYKDIKKELIFKLPKYSLFELENGRRRMLASATELQKANELVLPQHLVRLLYYTQNISATTGSNNLGYIEQHREEFKEIFEKIIDFSEKYILKNKVNSNLKSSFDEQFAVSDSILLSNSFVSLLKYTSFGASGGFTFLDLDVKQGRLRYQTVTEVLDATLIYQSITGLYETRTDLSQLGGDSGGSKRTADGSEFESPKKKRKVHHHHHH

SEQ ID NO: 456 - protein, 1519 aa, Artificial Sequence
  ScCasFok, SV40+bipartiteSV40, ancestral mutations, Scloop AAmutant, HNHdeletion, 6His tag D4700
  misc_feature: synthetic
MAVTPKKKRKVGGSGSQLVKSELEEKKSELRHKLKYVPHEYIELIEIARNSTQDRILEMKVMEFFMKVYGYRGKHLGGSRKPDGAIYTVGSPIDYGVIVDTKAYSGGYNLPIGQADEMQRYVEENQTRNKHINPNEWWKVYPSSVTEFKFLFVSGHFKGNYKAQLTRLNHITNCNGAVLSVEELLIGGEMIKAGTLTLEEVRRKFNNGEINFSGSETPGTSESATPESMDKKYSIGLAIGTNSVGWAVITDDYKVPSKKMKVLGNTDRQSIKKNLIGALLFDSGETAEATRLKRTARRRYTRRKNRICYLQEIFANEMAKLDDSFFHRLEESFLVEEDKKHERHPIFGNLVDEVAYHENYPTIYHLRKKLADSTEKADLRLIYLALAHMIKFRGHFLIEGDLNAENSDVDKLFIQLVQTYNQLFEENPINESGVDAKAILSARLSKSRRLENLIAQFPGEKKNGLFGNIIALALGLTPNFKSNFDLTEDAKLQLSKDTYDDDLDELLGQIGDQYADLFLAAKNLSDAILLSDILRVNSEITKAPLSASMVKRYDEHHQDLALLKTLVRQQFPEKYAEIFKDDTKNGYAGYVGIGIKHAKATTKLATQEEFYKFIKPILEKMDGAEELLAKLNRDDLLRKQRTFDNGSIPHQIHLKELHAILRRQEEFYPFLKENREKIEKILTFRIPYYVGPLARGNSRFAWLTRKSEEAITPWNFEEVVDKGASAQSFIERMTNFDEYLPNKKVLPKHSLLYEYFTVYNELTKVKYVTEGMRKPEFLSGEQKEAIVDLLFKTNRKVTVKQLKEDYFKKIECFDSVEIIGVEDRFNASLGTYHDLLKIIKDKDFLDNEENEDILEDIVLTLTLFEDREMIEERLKKYANLFDDKVMKQLKRRHYTGWGRLSRKMINGIRDKQSGKTILDFLKSDGFSNRNFMQLIHDDSLTFKEEIEKAQVSGQGDSLHEQIADLAGSPAIKKGILQTVKIVDELVKVMGHKPENIVIEMARENQTTTKGLQQSRERKKRGGSAGGTGGSGGLSEADKAGFIKRQLVETRQITKHVARILDSRMNTKRDKNDKPIREVKVITLKSKLVSDFRKDFQLYKVRDINNYHHAHDAYLNAVVGTALIKKYPKLESEFVYGDYKVYDVRKMIAKSEQEIGKATAKRFFYSNIMNFFKTEVKLANGEIRKRPLIETNGETGEVVWNKEKDFATVRKVLAMPQVNIVKKTEVQTGGFSKESILSKRESAKLIPRKKGWDTRKYGGFGSPTVAYSILVVAKVEKGKAKKLKSVKVLVGITIMEKGSYEKDPIGFLEAKGYKDIKKELIFKLPKYSLFELENGRRRMLASATELQKANELVLPQHLVRLLYYTQNISATTGSNNLGYIEQHREEFKEIFEKIIDFSEKYILKNKVNSNLKSSFDEQFAVSDSILLSNSFVSLLKYTSFGASGGFTFLDLDVKQGRLRYQTVTEVLDATLIYQSITGLYETRTDLSQLGGDSGGSKRTADGSEFESPKKKRKVHHHHHH

SEQ ID NO: 457 - protein, 1509 aa, Artificial Sequence
  dScCasFok, SV40+bipartiteSV40, ancestral mutations, Scloop Sp Replacement, HNHdeletion, 6His tag D4701
  misc_feature: synthetic
MAVTPKKKRKVGGSGSQLVKSELEEKKSELRHKLKYVPHEYIELIEIARNSTQDRILEMKVMEFFMKVYGYRGKHLGGSRKPDGAIYTVGSPIDYGVIVDTKAYSGGYNLPIGQADEMQRYVEENQTRNKHINPNEWWKVYPSSVTEFKFLFVSGHFKGNYKAQLTRLNHITNCNGAVLSVEELLIGGEMIKAGTLTLEEVRRKFNNGEINFSGSETPGTSESATPESMDKKYSIGLAIGTNSVGWAVITDDYKVPSKKMKVLGNTDRQSIKKNLIGALLFDSGETAEATRLKRTARRRYTRRKNRICYLQEIFANEMAKLDDSFFHRLEESFLVEEDKKHERHPIFGNLVDEVAYHENYPTIYHLRKKLADSTEKADLRLIYLALAHMIKFRGHFLIEGDLNAENSDVDKLFIQLVQTYNQLFEENPINESGVDAKAILSARLSKSRRLENLIAQFPGEKKNGLFGNIIALALGLTPNFKSNFDLTEDAKLQLSKDTYDDDLDELLGQIGDQYADLFLAAKNLSDAILLSDILRVNSEITKAPLSASMIKRYDEHHQDLTLLKALVRQQLPEKYKEIFFDQSKNGYAGYIDGGASQEEFYKFIKPILEKMDGTEELLVKLNREDLLRKQRTFDNGSIPHQIHLGELHAILRRQEDFYPFLKDNREKIEKILTFRIPYYVGPLARGNSRFAWMTRKSEETITPWNFEEVVDKGASAQSFIERMTNFDEYLPNKKVLPKHSLLYEYFTVYNELTKVKYVTEGMRKPEFLSGEQKEAIVDLLFKTNRKVTVKQLKEDYFKKIECFDSVEIIGVEDRFNASLGTYHDLLKIIKDKDFLDNEENEDILEDIVLTLTLFEDREMIEERLKKYANLFDDKVMKQLKRRHYTGWGRLSRKMINGIRDKQSGKTILDFLKSDGFSNRNFMQLIHDDSLTFKEEIEKAQVSGQGDSLHEQIADLAGSPAIKKGILQTVKIVDELVKVMGHKPENIVIEMARENQTTTKGLQQSRERKKRGGSAGGTGGSGGLSEADKAGFIKRQLVETRQITKHVARILDSRMNTKRDKNDKPIREVKVITLKSKLVSDFRKDFQLYKVRDINNYHHAHDAYLNAVVGTALIKKYPKLESEFVYGDYKVYDVRKMIAKSEQEIGKATAKRFFYSNIMNFFKTEVKLANGEIRKRPLIETNGETGEVVWNKEKDFATVRKVLAMPQVNIVKKTEVQTGGFSKESILSKRESAKLIPRKKGWDTRKYGGFGSPTVAYSILVVAKVEKGKAKKLKSVKVLVGITIMEKGSYEKDPIGFLEAKGYKDIKKELIFKLPKYSLFELENGRRRMLASATELQKANELVLPQHLVRLLYYTQNISATTGSNNLGYIEQHREEFKEIFEKIIDFSEKYILKNKVNSNLKSSFDEQFAVSDSILLSNSFVSLLKYTSFGASGGFTFLDLDVKQGRLRYQTVTEVLDATLIYQSITGLYETRTDLSQLGGDSGGSKRTADGSEFESPKKKRKVHHHHHH

SEQ ID NO: 458 - protein, 1509 aa, Artificial Sequence; identical to SEQ ID NO: 453
  > dScCasFok, SV40+bipartiteSV40, ancestral mutations, Scloop deletion, HNHdeletion, 6His tag D4702
  misc_feature: synthetic

SEQ ID NO: 459 - protein, 1519 aa, Artificial Sequence
  dScCasFok, SV40+bipartiteSV40, ancestral mutations, Scloop QQmutant, HNHdeletion, 6His tag D4703
  misc_feature: synthetic
MAVTPKKKRKVGGSGSQLVKSELEEKKSELRHKLKYVPHEYIELIEIARNSTQDRILEMKVMEFFMKVYGYRGKHLGGSRKPDGAIYTVGSPIDYGVIVDTKAYSGGYNLPIGQADEMQRYVEENQTRNKHINPNEWWKVYPSSVTEFKFLFVSGHFKGNYKAQLTRLNHITNCNGAVLSVEELLIGGEMIKAGTLTLEEVRRKFNNGEINFSGSETPGTSESATPESMDKKYSIGLAIGTNSVGWAVITDDYKVPSKKMKVLGNTDRQSIKKNLIGALLFDSGETAEATRLKRTARRRYTRRKNRICYLQEIFANEMAKLDDSFFHRLEESFLVEEDKKHERHPIFGNLVDEVAYHENYPTIYHLRKKLADSTEKADLRLIYLALAHMIKFRGHFLIEGDLNAENSDVDKLFIQLVQTYNQLFEENPINESGVDAKAILSARLSKSRRLENLIAQFPGEKKNGLFGNIIALALGLTPNFKSNFDLTEDAKLQLSKDTYDDDLDELLGQIGDQYADLFLAAKNLSDAILLSDILRVNSEITKAPLSASMVKRYDEHHQDLALLKTLVRQQLPEKYKEIFSDQSKNGYAGYIDIGIKHQKQTTKLTSQEEFYKFIKPILEKMDGAEELLAKLNREDLLRKQRTFDNGSIPHQIHLGELHAILRRQEEFYPFLKDNREKIEKILTFRIPYYVGPLARGNSRFAWMTRKSDEAITPWNFEEVVDKGASAQSFIERMTNFDEYLPNKKVLPKHSLLYEYFTVYNELTKVKYVTEGMRKPEFLSGEQKEAIVDLLFKTNRKVTVKQLKEDYFKKIECFDSVEIIGVEDRFNASLGTYHDLLKIIKDKDFLDNEENEDILEDIVLTLTLFEDREMIEERLKKYANLFDDKVMKQLKRRHYTGWGRLSRKMINGIRDKQSGKTILDFLKSDGFSNRNFMQLIHDDSLTFKEEIEKAQVSGQGDSLHEQIADLAGSPAIKKGILQTVKIVDELVKVMGHKPENIVIEMARENQTTTKGLQQSRERKKRGGSAGGTGGSGGLSEADKAGFIKRQLVETRQITKHVARILDSRMNTKRDKNDKPIREVKVITLKSKLVSDFRKDFQLYKVRDINNYHHAHDAYLNAVVGTALIKKYPKLESEFVYGDYKVYDVRKMIAKSEQEIGKATAKRFFYSNIMNFFKTEVKLANGEIRKRPLIETNGETGEVVWNKEKDFATVRKVLAMPQVNIVKKTEVQTGGFSKESILSKRESAKLIPRKKGWDTRKYGGFGSPTVAYSILVVAKVEKGKAKKLKSVKVLVGITIMEKGSYEKDPIGFLEAKGYKDIKKELIFKLPKYSLFELENGRRRMLASATELQKANELVLPQHLVRLLYYTQNISATTGSNNLGYIEQHREEFKEIFEKIIDFSEKYILKNKVNSNLKSSFDEQFAVSDSILLSNSFVSLLKYTSFGASGGFTFLDLDVKQGRLRYQTVTEVLDATLIYQSITGLYETRTDLSQLGGDSGGSKRTADGSEFESPKKKRKVHHHHHH

SEQ ID NO: 460 - protein, 1519 aa, Artificial Sequence
  dScCasFok, SV40+bipartiteSV40, ancestral mutations, Scloop AAmutant, HNHdeletion, 6His tag D4704
  misc_feature: synthetic
MAVTPKKKRKVGGSGSQLVKSELEEKKSELRHKLKYVPHEYIELIEIARNSTQDRILEMKVMEFFMKVYGYRGKHLGGSRKPDGAIYTVGSPIDYGVIVDTKAYSGGYNLPIGQADEMQRYVEENQTRNKHINPNEWWKVYPSSVTEFKFLFVSGHFKGNYKAQLTRLNHITNCNGAVLSVEELLIGGEMIKAGTLTLEEVRRKFNNGEINFSGSETPGTSESATPESMDKKYSIGLAIGTNSVGWAVITDDYKVPSKKMKVLGNTDRQSIKKNLIGALLFDSGETAEATRLKRTARRRYTRRKNRICYLQEIFANEMAKLDDSFFHRLEESFLVEEDKKHERHPIFGNLVDEVAYHENYPTIYHLRKKLADSTEKADLRLIYLALAHMIKFRGHFLIEGDLNAENSDVDKLFIQLVQTYNQLFEENPINESGVDAKAILSARLSKSRRLENLIAQFPGEKKNGLFGNIIALALGLTPNFKSNFDLTEDAKLQLSKDTYDDDLDELLGQIGDQYADLFLAAKNLSDAILLSDILRVNSEITKAPLSASMVKRYDEHHQDLALLKTLVRQQLPEKYKEIFSDQSKNGYAGYIDIGIKHAKATTKLTSQEEFYKFIKPILEKMDGAEELLAKLNREDLLRKQRTFDNGSIPHQIHLGELHAILRRQEEFYPFLKDNREKIEKILTFRIPYYVGPLARGNSRFAWMTRKSDEAITPWNFEEVVDKGASAQSFIERMTNFDEYLPNKKVLPKHSLLYEYFTVYNELTKVKYVTEGMRKPEFLSGEQKEAIVDLLFKTNRKVTVKQLKEDYFKKIECFDSVEIIGVEDRFNASLGTYHDLLKIIKDKDFLDNEENEDILEDIVLTLTLFEDREMIEERLKKYANLFDDKVMKQLKRRHYTGWGRLSRKMINGIRDKQSGKTILDFLKSDGFSNRNFMQLIHDDSLTFKEEIEKAQVSGQGDSLHEQIADLAGSPAIKKGILQTVKIVDELVKVMGHKPENIVIEMARENQTTTKGLQQSRERKKRGGSAGGTGGSGGLSEADKAGFIKRQLVETRQITKHVARILDSRMNTKRDKNDKPIREVKVITLKSKLVSDFRKDFQLYKVRDINNYHHAHDAYLNAVVGTALIKKYPKLESEFVYGDYKVYDVRKMIAKSEQEIGKATAKRFFYSNIMNFFKTEVKLANGEIRKRPLIETNGETGEVVWNKEKDFATVRKVLAMPQVNIVKKTEVQTGGFSKESILSKRESAKLIPRKKGWDTRKYGGFGSPTVAYSILVVAKVEKGKAKKLKSVKVLVGITIMEKGSYEKDPIGFLEAKGYKDIKKELIFKLPKYSLFELENGRRRMLASATELQKANELVLPQHLVRLLYYTQNISATTGSNNLGYIEQHREEFKEIFEKIIDFSEKYILKNKVNSNLKSSFDEQFAVSDSILLSNSFVSLLKYTSFGASGGFTFLDLDVKQGRLRYQTVTEVLDATLIYQSITGLYETRTDLSQLGGDSGGSKRTADGSEFESPKKKRKVHHHHHH

SEQ ID NO: 461 - protein, 1526 aa, Artificial Sequence
  dScCasFok, SV40+nucleoplasmin, ancestral mutations, Scloop deletion, HNH deletion, PAM replaced with Zinc finger D4710
  misc_feature: synthetic
MAVTPKKKRKVGGSGSQLVKSELEEKKSELRHKLKYVPHEYIELIEIARNSTQDRILEMKVMEFFMKVYGYRGKHLGGSRKPDGAIYTVGSPIDYGVIVDTKAYSGGYNLPIGQADEMQRYVEENQTRNKHINPNEWWKVYPSSVTEFKFLFVSGHFKGNYKAQLTRLNHITNCNGAVLSVEELLIGGEMIKAGTLTLEEVRRKFNNGEINFSGSETPGTSESATPESMDKKYSIGLAIGTNSVGWAVITDDYKVPSKKMKVLGNTDRQSIKKNLIGALLFDSGETAEATRLKRTARRRYTRRKNRICYLQEIFANEMAKLDDSFFHRLEESFLVEEDKKHERHPIFGNLVDEVAYHENYPTIYHLRKKLADSTEKADLRLIYLALAHMIKFRGHFLIEGDLNAENSDVDKLFIQLVQTYNQLFEENPINESGVDAKAILSARLSKSRRLENLIAQFPGEKKNGLFGNIIALALGLTPNFKSNFDLTEDAKLQLSKDTYDDDLDELLGQIGDQYADLFLAAKNLSDAILLSDILRVNSEITKAPLSASMVKRYDEHHQDLALLKTLVRQQLPEKYKEIFSDQSKNGYAGYIDIGTSQEEFYKFIKPILEKMDGAEELLAKLNREDLLRKQRTFDNGSIPHQIHLGELHAILRRQEEFYPFLKDNREKIEKILTFRIPYYVGPLARGNSRFAWMTRKSDEAITPWNFEEVVDKGASAQSFIERMTNFDEYLPNKKVLPKHSLLYEYFTVYNELTKVKYVTEGMRKPEFLSGEQKEAIVDLLFKTNRKVTVKQLKEDYFKKIECFDSVEIIGVEDRFNASLGTYHDLLKIIKDKDFLDNEENEDILEDIVLTLTLFEDREMIEERLKKYANLFDDKVMKQLKRRHYTGWGRLSRKMINGIRDKQSGKTILDFLKSDGFSNRNFMQLIHDDSLTFKEEIEKAQVSGQGDSLHEQIADLAGSPAIKKGILQTVKIVDELVKVMGHKPENIVIEMARENQTTTKGLQQSRERKKRGGSAGGTGGSGGLSEADKAGFIKRQLVETRQITKHVARILDSRMNTKRDKNDKPIREVKVITLKSKLVSDFRKDFQLYKVRDINNYHHAHDAYLNAVVGTALIKKYPKLESEFVYGDYKVYDVRKMIAKSEQEIGKATAKRFFYSNIMNFFKTEVKLANGEIRKRPLIETNGETGEVVWNKEKDFATVRKVLAMPQVNIVKKTEVQTGGFSKESILSKRESAKLIPRKKGWDTRKYGGFGSPTVAYSILVVAKVEKGKAKKLKSVKVLVGITIMEKGSYEKDPIGFLEAKGYKDIKKELIFKLPKYSLFELENGRRRMLASATELQKANELVLPQHLVRLLYYTQNISATTGSNNLGYIEQHREEFKEIFEKIIDFSEKYILKNKVNSNLKSSFDEQFAVSDSILLSNSFVSLLKYTSFGAGGSAGGTGGSAGGSGAPYRCPCRAGCPSLASMQAHMRGHSGGSGYQTVTEVLDATLIYQSITGLYETRTDLSQLGGDKRPAATKKAGQAKKKKGA

SEQ ID NO: 462 - protein, 1443 aa, Artificial Sequence
  dScCasFok, SV40+nucleoplasmin, ancestral mutations, Scloop deletion, HNH deletion, PAM replaced with LacI DNA binding domain D4711
  misc_feature: synthetic
MAVTPKKKRKVGGSGSQLVKSELEEKKSELRHKLKYVPHEYIELIEIARNSTQDRILEMKVMEFFMKVYGYRGKHLGGSRKPDGAIYTVGSPIDYGVIVDTKAYSGGYNLPIGQADEMQRYVEENQTRNKHINPNEWWKVYPSSVTEFKFLFVSGHFKGNYKAQLTRLNHITNCNGAVLSVEELLIGGEMIKAGTLTLEEVRRKFNNGEINFSGSETPGTSESATPESMDKKYSIGLAIGTNSVGWAVITDDYKVPSKKMKVLGNTDRQSIKKNLIGALLFDSGETAEATRLKRTARRRYTRRKNRICYLQEIFANEMAKLDDSFFHRLEESFLVEEDKKHERHPIFGNLVDEVAYHENYPTIYHLRKKLADSTEKADLRLIYLALAHMIKFRGHFLIEGDLNAENSDVDKLFIQLVQTYNQLFEENPINESGVDAKAILSARLSKSRRLENLIAQFPGEKKNGLFGNIIALALGLTPNFKSNFDLTEDAKLQLSKDTYDDDLDELLGQIGDQYADLFLAAKNLSDAILLSDILRVNSEITKAPLSASMVKRYDEHHQDLALLKTLVRQQLPEKYKEIFSDQSKNGYAGYIDIGTSQEEFYKFIKPILEKMDGAEELLAKLNREDLLRKQRTFDNGSIPHQIHLGELHAILRRQEEFYPFLKDNREKIEKILTFRIPYYVGPLARGNSRFAWMTRKSDEAITPWNFEEVVDKGASAQSFIERMTNFDEYLPNKKVLPKHSLLYEYFTVYNELTKVKYVTEGMRKPEFLSGEQKEAIVDLLFKTNRKVTVKQLKEDYFKKIECFDSVEIIGVEDRFNASLGTYHDLLKIIKDKDFLDNEENEDILEDIVLTLTLFEDREMIEERLKKYANLFDDKVMKQLKRRHYTGWGRLSRKMINGIRDKQSGKTILDFLKSDGFSNRNFMQLIHDDSLTFKEEIEKAQVSGQGDSLHEQIADLAGSPAIKKGILQTVKIVDELVKVMGHKPENIVIEMARENQTTTKGLQQSRERKKRGGSAGGTGGSGGLSEADKAGFIKRQLVETRQITKHVARILDSRMNTKRDKNDKPIREVKVITLKSKLVSDFRKDFQLYKVRDINNYHHAHDAYLNAVVGTALIKKYPKLESEFVYGDYKVYDVRKMIAKSEQEIGKATAKRFFYSNIMNFFKTEVKLANGEIRKRPLIETNGETGEVVWNKEKDFATVRKVLAMPQVNIVKKTEVQTGGFSKESILSKRESAKLIPRKKGWDTRKYGGFGSPTVAYSILVVAKVEKGKAKKLKSVKVLVGITIMEKGSYEKDPIGFLEAKGYKDIKKELIFKLPKYSLFELENGRRRMLASATELQKAGGSGMKPVTLYDVAEYAGVSYQTVSRVVNQASHVSAKTREKVEAAMAELNGGSGYQTVTEVLDATLIYQSITGLYETRTDLSQLGGDKRPAATKKAGQAKKKKGA

SEQ ID NO: 463 - protein, 1463 aa, Artificial Sequence
  dScCasFok, SV40+nucleoplasmin, ancestral mutations, Scloop deletion, HNH deletion, PAM replaced with SSO7D D4712
  misc_feature: synthetic
MAVTPKKKRKVGGSGSQLVKSELEEKKSELRHKLKYVPHEYIELIEIARNSTQDRILEMKVMEFFMKVYGYRGKHLGGSRKPDGAIYTVGSPIDYGVIVDTKAYSGGYNLPIGQADEMQRYVEENQTRNKHINPNEWWKVYPSSVTEFKFLFVSGHFKGNYKAQLTRLNHITNCNGAVLSVEELLIGGEMIKAGTLTLEEVRRKFNNGEINFSGSETPGTSESATPESMDKKYSIGLAIGTNSVGWAVITDDYKVPSKKMKVLGNTDRQSIKKNLIGALLFDSGETAEATRLKRTARRRYTRRKNRICYLQEIFANEMAKLDDSFFHRLEESFLVEEDKKHERHPIFGNLVDEVAYHENYPTIYHLRKKLADSTEKADLRLIYLALAHMIKFRGHFLIEGDLNAENSDVDKLFIQLVQTYNQLFEENPINESGVDAKAILSARLSKSRRLENLIAQFPGEKKNGLFGNIIALALGLTPNFKSNFDLTEDAKLQLSKDTYDDDLDELLGQIGDQYADLFLAAKNLSDAILLSDILRVNSEITKAPLSASMVKRYDEHHQDLALLKTLVRQQLPEKYKEIFSDQSKNGYAGYIDIGTSQEEFYKFIKPILEKMDGAEELLAKLNREDLLRKQRTFDNGSIPHQIHLGELHAILRRQEEFYPFLKDNREKIEKILTFRIPYYVGPLARGNSRFAWMTRKSDEAITPWNFEEVVDKGASAQSFIERMTNFDEYLPNKKVLPKHSLLYEYFTVYNELTKVKYVTEGMRKPEFLSGEQKEAIVDLLFKTNRKVTVKQLKEDYFKKIECFDSVEIIGVEDRFNASLGTYHDLLKIIKDKDFLDNEENEDILEDIVLTLTLFEDREMIEERLKKYANLFDDKVMKQLKRRHYTGWGRLSRKMINGIRDKQSGKTILDFLKSDGFSNRNFMQLIHDDSLTFKEEIEKAQVSGQGDSLHEQIADLAGSPAIKKGILQTVKIVDELVKVMGHKPENIVIEMARENQTTTKGLQQSRERKKRGGSAGGTGGSGGLSEADKAGFIKRQLVETRQITKHVARILDSRMNTKRDKNDKPIREVKVITLKSKLVSDFRKDFQLYKVRDINNYHHAHDAYLNAVVGTALIKKYPKLESEFVYGDYKVYDVRKMIAKSEQEIGKATAKRFFYSNIMNFFKTEVKLANGEIRKRPLIETNGETGEVVWNKEKDFATVRKVLAMPQVNIVKKTEVQTGGFSKESILSKRESAKLIPRKKGWDTRKYGGFGSPTVAYSILVVAKVEKGKAKKLKSVKVLVGITIMEKGSYEKDPIGFLEAKGYKDIKKELIFKLPKYSLFELENGRRRMLASATELQKAGGSAGMATVKFKYKGEEKEVDISKIKKVWRVGKMISFTYDEGGGKTGRGAVSEKDAPKELLQMLEKQKKGGSAGYQTVTEVLDATLIYQSITGLYETRTDLSQLGGDKRPAATKKAGQAKKKKGA

SEQ ID NO: 464 - protein, 1587 aa, Artificial Sequence
  dScCasFok, SV40+nucleoplasmin, ancestral mutations, Scloop deletion, HNH deletion, PAM replaced with HMGN D4713
  misc_feature: synthetic
MAVTPKKKRKVGGSGSQLVKSELEEKKSELRHKLKYVPHEYIELIEIARNSTQDRILEMKVMEFFMKVYGYRGKHLGGSRKPDGAIYTVGSPIDYGVIVDTKAYSGGYNLPIGQADEMQRYVEENQTRNKHINPNEWWKVYPSSVTEFKFLFVSGHFKGNYKAQLTRLNHITNCNGAVLSVEELLIGGEMIKAGTLTLEEVRRKFNNGEINFSGSETPGTSESATPESMDKKYSIGLAIGTNSVGWAVITDDYKVPSKKMKVLGNTDRQSIKKNLIGALLFDSGETAEATRLKRTARRRYTRRKNRICYLQEIFANEMAKLDDSFFHRLEESFLVEEDKKHERHPIFGNLVDEVAYHENYPTIYHLRKKLADSTEKADLRLIYLALAHMIKFRGHFLIEGDLNAENSDVDKLFIQLVQTYNQLFEENPINESGVDAKAILSARLSKSRRLENLIAQFPGEKKNGLFGNIIALALGLTPNFKSNFDLTEDAKLQLSKDTYDDDLDELLGQIGDQYADLFLAAKNLSDAILLSDILRVNSEITKAPLSASMVKRYDEHHQDLALLKTLVRQQLPEKYKEIFSDQSKNGYAGYIDIGTSQEEFYKFIKPILEKMDGAEELLAKLNREDLLRKQRTFDNGSIPHQIHLGELHAILRRQEEFYPFLKDNREKIEKILTFRIPYYVGPLARGNSRFAWMTRKSDEAITPWNFEEVVDKGASAQSFIERMTNFDEYLPNKKVLPKHSLLYEYFTVYNELTKVKYVTEGMRKPEFLSGEQKEAIVDLLFKTNRKVTVKQLKEDYFKKIECFDSVEIIGVEDRFNASLGTYHDLLKIIKDKDFLDNEENEDILEDIVLTLTLFEDREMIEERLKKYANLFDDKVMKQLKRRHYTGWGRLSRKMINGIRDKQSGKTILDFLKSDGFSNRNFMQLIHDDSLTFKEEIEKAQVSGQGDSLHEQIADLAGSPAIKKGILQTVKIVDELVKVMGHKPENIVIEMARENQTTTKGLQQSRERKKRGGSAGGTGGSGGLSEADKAGFIKRQLVETRQITKHVARILDSRMNTKRDKNDKPIREVKVITLKSKLVSDFRKDFQLYKVRDINNYHHAHDAYLNAVVGTALIKKYPKLESEFVYGDYKVYDVRKMIAKSEQEIGKATAKRFFYSNIMNFFKTEVKLANGEIRKRPLIETNGETGEVVWNKEKDFATVRKVLAMPQVNIVKKTEVQTGGFSKESILSKRESAKLIPRKKGWDTRKYGGFGSPTVAYSILVVAKVEKGKAKKLKSVKVLVGITIMEKGSYEKDPIGFLEAKGYKDIKKELIFKLPKYSLFELENGRRRMLASATELQKANELVLPQHLVRLLYYTQNISATTGSNNLGYIEQHREEFKEIFEKIIDFSEKYILKNKVNSNLKSSFDEQFAVSDSILLSNSFVSLLKYTSFGAGGSGPKRKVSSAEGAAKEEPKRRSARLSAKPPAKVEAKPKKAAAKDKSSDKKVQTKGKRGAKGKQAEVANQETKEDLPAENGETKTEESPASDEAGEKEAKSDGGSGYQTVTEVLDATLIYQSITGLYETRTDLSQLGGDKRPAATKKAGQAKKKK

SEQ ID NO: 465 - protein, 1483 aa, Artificial Sequence
  dScCasFok, SV40+nucleoplasmin, ancestral mutations, Scloop deletion, HNH deletion, PAM replaced with STO7 D4714
  misc_feature: synthetic
MAVTPKKKRKVGGSGSQLVKSELEEKKSELRHKLKYVPHEYIELIEIARNSTQDRILEMKVMEFFMKVYGYRGKHLGGSRKPDGAIYTVGSPIDYGVIVDTKAYSGGYNLPIGQADEMQRYVEENQTRNKHINPNEWWKVYPSSVTEFKFLFVSGHFKGNYKAQLTRLNHITNCNGAVLSVEELLIGGEMIKAGTLTLEEVRRKFNNGEINFSGSETPGTSESATPESMDKKYSIGLAIGTNSVGWAVITDDYKVPSKKMKVLGNTDRQSIKKNLIGALLFDSGETAEATRLKRTARRRYTRRKNRICYLQEIFANEMAKLDDSFFHRLEESFLVEEDKKHERHPIFGNLVDEVAYHENYPTIYHLRKKLADSTEKADLRLIYLALAHMIKFRGHFLIEGDLNAENSDVDKLFIQLVQTYNQLFEENPINESGVDAKAILSARLSKSRRLENLIAQFPGEKKNGLFGNIIALALGLTPNFKSNFDLTEDAKLQLSKDTYDDDLDELLGQIGDQYADLFLAAKNLSDAILLSDILRVNSEITKAPLSASMVKRYDEHHQDLALLKTLVRQQLPEKYKEIFSDQSKNGYAGYIDIGTSQEEFYKFIKPILEKMDGAEELLAKLNREDLLRKQRTFDNGSIPHQIHLGELHAILRRQEEFYPFLKDNREKIEKILTFRIPYYVGPLARGNSRFAWMTRKSDEAITPWNFEEVVDKGASAQSFIERMTNFDEYLPNKKVLPKHSLLYEYFTVYNELTKVKYVTEGMRKPEFLSGEQKEAIVDLLFKTNRKVTVKQLKEDYFKKIECFDSVEIIGVEDRFNASLGTYHDLLKIIKDKDFLDNEENEDILEDIVLTLTLFEDREMIEERLKKYANLFDDKVMKQLKRRHYTGWGRLSRKMINGIRDKQSGKTILDFLKSDGFSNRNFMQLIHDDSLTFKEEIEKAQVSGQGDSLHEQIADLAGSPAIKKGILQTVKIVDELVKVMGHKPENIVIEMARENQTTTKGLQQSRERKKRGGSAGGTGGSGGLSEADKAGFIKRQLVETRQITKHVARILDSRMNTKRDKNDKPIREVKVITLKSKLVSDFRKDFQLYKVRDINNYHHAHDAYLNAVVGTALIKKYPKLESEFVYGDYKVYDVRKMIAKSEQEIGKATAKRFFYSNIMNFFKTEVKLANGEIRKRPLIETNGETGEVVWNKEKDFATVRKVLAMPQVNIVKKTEVQTGGFSKESILSKRESAKLIPRKKGWDTRKYGGFGSPTVAYSILVVAKVEKGKAKKLKSVKVLVGITIMEKGSYEKDPIGFLEAKGYKDIKKELIFKLPKYSLFELENGRRRMLASATELQKAGGSAGGTGGSAGGVTVKFKYKGEEKEVDISKIKKVWRVGKMISFTYDDNGKTGRGAVSEKDAPKELLQMLEKSGKKGGSAGGTGGSAGGYQTVTEVLDATLIYQSITGLYETRTDLSQLGGDKRPAATKKAGQAKKKKPKKKRKV

SEQ ID NO: 466 - protein, 1536 aa, Artificial Sequence
  dScCasFok, SV40+nucleoplasmin, ancestral mutations, Scloop QQmutation, HNH deletion, PAM replaced with Zinc finger D4715
  misc_feature: synthetic
MAVTPKKKRKVGGSGSQLVKSELEEKKSELRHKLKYVPHEYIELIEIARNSTQDRILEMKVMEFFMKVYGYRGKHLGGSRKPDGAIYTVGSPIDYGVIVDTKAYSGGYNLPIGQADEMQRYVEENQTRNKHINPNEWWKVYPSSVTEFKFLFVSGHFKGNYKAQLTRLNHITNCNGAVLSVEELLIGGEMIKAGTLTLEEVRRKFNNGEINFSGSETPGTSESATPESMDKKYSIGLAIGTNSVGWAVITDDYKVPSKKMKVLGNTDRQSIKKNLIGALLFDSGETAEATRLKRTARRRYTRRKNRICYLQEIFANEMAKLDDSFFHRLEESFLVEEDKKHERHPIFGNLVDEVAYHENYPTIYHLRKKLADSTEKADLRLIYLALAHMIKFRGHFLIEGDLNAENSDVDKLFIQLVQTYNQLFEENPINESGVDAKAILSARLSKSRRLENLIAQFPGEKKNGLFGNIIALALGLTPNFKSNFDLTEDAKLQLSKDTYDDDLDELLGQIGDQYADLFLAAKNLSDAILLSDILRVNSEITKAPLSASMVKRYDEHHQDLALLKTLVRQQLPEKYKEIFSDQSKNGYAGYIDIGIKHQKQTTKLTSQEEFYKFIKPILEKMDGAEELLAKLNREDLLRKQRTFDNGSIPHQIHLGELHAILRRQEEFYPFLKDNREKIEKILTFRIPYYVGPLARGNSRFAWMTRKSDEAITPWNFEEVVDKGASAQSFIERMTNFDEYLPNKKVLPKHSLLYEYFTVYNELTKVKYVTEGMRKPEFLSGEQKEAIVDLLFKTNRKVTVKQLKEDYFKKIECFDSVEIIGVEDRFNASLGTYHDLLKIIKDKDFLDNEENEDILEDIVLTLTLFEDREMIEERLKKYANLFDDKVMKQLKRRHYTGWGRLSRKMINGIRDKQSGKTILDFLKSDGFSNRNFMQLIHDDSLTFKEEIEKAQVSGQGDSLHEQIADLAGSPAIKKGILQTVKIVDELVKVMGHKPENIVIEMARENQTTTKGLQQSRERKKRGGSAGGTGGSGGLSEADKAGFIKRQLVETRQITKHVARILDSRMNTKRDKNDKPIREVKVITLKSKLVSDFRKDFQLYKVRDINNYHHAHDAYLNAVVGTALIKKYPKLESEFVYGDYKVYDVRKMIAKSEQEIGKATAKRFFYSNIMNFFKTEVKLANGEIRKRPLIETNGETGEVVWNKEKDFATVRKVLAMPQVNIVKKTEVQTGGFSKESILSKRESAKLIPRKKGWDTRKYGGFGSPTVAYSILVVAKVEKGKAKKLKSVKVLVGITIMEKGSYEKDPIGFLEAKGYKDIKKELIFKLPKYSLFELENGRRRMLASATELQKANELVLPQHLVRLLYYTQNISATTGSNNLGYIEQHREEFKEIFEKIIDFSEKYILKNKVNSNLKSSFDEQFAVSDSILLSNSFVSLLKYTSFGAGGSAGGTGGSAGGSGAPYRCPCRAGCPSLASMQAHMRGHSGGSGYQTVTEVLDATLIYQSITGLYETRTDLSQLGGDKRPAATKKAGQAKKKKGA

SEQ ID NO: 467 - protein, 1453 aa, Artificial Sequence
  dScCasFok, SV40+nucleoplasmin, ancestral mutations, Scloop QQmutation HNH deletion, PAM replaced with LacI DNA binding domain D4716
  misc_feature: synthetic
MAVTPKKKRKVGGSGSQLVKSELEEKKSELRHKLKYVPHEYIELIEIARNSTQDRILEMKVMEFFMKVYGYRGKHLGGSRKPDGAIYTVGSPIDYGVIVDTKAYSGGYNLPIGQADEMQRYVEENQTRNKHINPNEWWKVYPSSVTEFKFLFVSGHFKGNYKAQLTRLNHITNCNGAVLSVEELLIGGEMIKAGTLTLEEVRRKFNNGEINFSGSETPGTSESATPESMDKKYSIGLAIGTNSVGWAVITDDYKVPSKKMKVLGNTDRQSIKKNLIGALLFDSGETAEATRLKRTARRRYTRRKNRICYLQEIFANEMAKLDDSFFHRLEESFLVEEDKKHERHPIFGNLVDEVAYHENYPTIYHLRKKLADSTEKADLRLIYLALAHMIKFRGHFLIEGDLNAENSDVDKLFIQLVQTYNQLFEENPINESGVDAKAILSARLSKSRRLENLIAQFPGEKKNGLFGNIIALALGLTPNFKSNFDLTEDAKLQLSKDTYDDDLDELLGQIGDQYADLFLAAKNLSDAILLSDILRVNSEITKAPLSASMVKRYDEHHQDLALLKTLVRQQLPEKYKEIFSDQSKNGYAGYIDIGIKHQKQTTKLTSQEEFYKFIKPILEKMDGAEELLAKLNREDLLRKQRTFDNGSIPHQIHLGELHAILRRQEEFYPFLKDNREKIEKILTFRIPYYVGPLARGNSRFAWMTRKSDEAITPWNFEEVVDKGASAQSFIERMTNFDEYLPNKKVLPKHSLLYEYFTVYNELTKVKYVTEGMRKPEFLSGEQKEAIVDLLFKTNRKVTVKQLKEDYFKKIECFDSVEIIGVEDRFNASLGTYHDLLKIIKDKDFLDNEENEDILEDIVLTLTLFEDREMIEERLKKYANLFDDKVMKQLKRRHYTGWGRLSRKMINGIRDKQSGKTILDFLKSDGFSNRNFMQLIHDDSLTFKEEIEKAQVSGQGDSLHEQIADLAGSPAIKKGILQTVKIVDELVKVMGHKPENIVIEMARENQTTTKGLQQSRERKKRGGSAGGTGGSGGLSEADKAGFIKRQLVETRQITKHVARILDSRMNTKRDKNDKPIREVKVITLKSKLVSDFRKDFQLYKVRDINNYHHAHDAYLNAVVGTALIKKYPKLESEFVYGDYKVYDVRKMIAKSEQEIGKATAKRFFYSNIMNFFKTEVKLANGEIRKRPLIETNGETGEVVWNKEKDFATVRKVLAMPQVNIVKKTEVQTGGFSKESILSKRESAKLIPRKKGWDTRKYGGFGSPTVAYSILVVAKVEKGKAKKLKSVKVLVGITIMEKGSYEKDPIGFLEAKGYKDIKKELIFKLPKYSLFELENGRRRMLASATELQKAGGSGMKPVTLYDVAEYAGVSYQTVSRVVNQASHVSAKTREKVEAAMAELNGGSGYQTVTEVLDATLIYQSITGLYETRTDLSQLGGDKRPAATKKAGQAKKKKGA

SEQ ID NO: 468 - protein, 1473 aa, Artificial Sequence
  dScCasFok, SV40+nucleoplasmin, ancestral mutations, Scloop QQmutation, HNH deletion, PAM replaced with SSO7D D4717
  misc_feature: synthetic
MAVTPKKKRKVGGSGSQLVKSELEEKKSELRHKLKYVPHEYIELIEIARNSTQDRILEMKVMEFFMKVYGYRGKHLGGSRKPDGAIYTVGSPIDYGVIVDTKAYSGGYNLPIGQADEMQRYVEENQTRNKHINPNEWWKVYPSSVTEFKFLFVSGHFKGNYKAQLTRLNHITNCNGAVLSVEELLIGGEMIKAGTLTLEEVRRKFNNGEINFSGSETPGTSESATPESMDKKYSIGLAIGTNSVGWAVITDDYKVPSKKMKVLGNTDRQSIKKNLIGALLFDSGETAEATRLKRTARRRYTRRKNRICYLQEIFANEMAKLDDSFFHRLEESFLVEEDKKHERHPIFGNLVDEVAYHENYPTIYHLRKKLADSTEKADLRLIYLALAHMIKFRGHFLIEGDLNAENSDVDKLFIQLVQTYNQLFEENPINESGVDAKAILSARLSKSRRLENLIAQFPGEKKNGLFGNIIALALGLTPNFKSNFDLTEDAKLQLSKDTYDDDLDELLGQIGDQYADLFLAAKNLSDAILLSDILRVNSEITKAPLSASMVKRYDEHHQDLALLKTLVRQQLPEKYKEIFSDQSKNGYAGYIDIGIKHQKQTTKLTSQEEFYKFIKPILEKMDGAEELLAKLNREDLLRKQRTFDNGSIPHQIHLGELHAILRRQEEFYPFLKDNREKIEKILTFRIPYYVGPLARGNSRFAWMTRKSDEAITPWNFEEVVDKGASAQSFIERMTNFDEYLPNKKVLPKHSLLYEYFTVYNELTKVKYVTEGMRKPEFLSGEQKEAIVDLLFKTNRKVTVKQLKEDYFKKIECFDSVEIIGVEDRFNASLGTYHDLLKIIKDKDFLDNEENEDILEDIVLTLTLFEDREMIEERLKKYANLFDDKVMKQLKRRHYTGWGRLSRKMINGIRDKQSGKTILDFLKSDGFSNRNFMQLIHDDSLTFKEEIEKAQVSGQGDSLHEQIADLAGSPAIKKGILQTVKIVDELVKVMGHKPENIVIEMARENQTTTKGLQQSRERKKRGGSAGGTGGSGGLSEADKAGFIKRQLVETRQITKHVARILDSRMNTKRDKNDKPIREVKVITLKSKLVSDFRKDFQLYKVRDINNYHHAHDAYLNAVVGTALIKKYPKLESEFVYGDYKVYDVRKMIAKSEQEIGKATAKRFFYSNIMNFFKTEVKLANGEIRKRPLIETNGETGEVVWNKEKDFATVRKVLAMPQVNIVKKTEVQTGGFSKESILSKRESAKLIPRKKGWDTRKYGGFGSPTVAYSILVVAKVEKGKAKKLKSVKVLVGITIMEKGSYEKDPIGFLEAKGYKDIKKELIFKLPKYSLFELENGRRRMLASATELQKAGGSAGMATVKFKYKGEEKEVDISKIKKVWRVGKMISFTYDEGGGKTGRGAVSEKDAPKELLQMLEKQKKGGSAGYQTVTEVLDATLIYQSITGLYETRTDLSQLGGDKRPAATKKAGQAKKKKGA

SEQ ID NO: 469 - protein, 1597 aa, Artificial Sequence
  dScCasFok, SV40+nucleoplasmin, ancestral mutations, Scloop QQmutation, HNH deletion, PAM replaced with HMGN D4718
  misc_feature: synthetic
MAVTPKKKRKVGGSGSQLVKSELEEKKSELRHKLKYVPHEYIELIEIARNSTQDRILEMKVMEFFMKVYGYRGKHLGGSRKPDGAIYTVGSPIDYGVIVDTKAYSGGYNLPIGQADEMQRYVEENQTRNKHINPNEWWKVYPSSVTEFKFLFVSGHFKGNYKAQLTRLNHITNCNGAVLSVEELLIGGEMIKAGTLTLEEVRRKFNNGEINFSGSETPGTSESATPESMDKKYSIGLAIGTNSVGWAVITDDYKVPSKKMKVLGNTDRQSIKKNLIGALLFDSGETAEATRLKRTARRRYTRRKNRICYLQEIFANEMAKLDDSFFHRLEESFLVEEDKKHERHPIFGNLVDEVAYHENYPTIYHLRKKLADSTEKADLRLIYLALAHMIKFRGHFLIEGDLNAENSDVDKLFIQLVQTYNQLFEENPINESGVDAKAILSARLSKSRRLENLIAQFPGEKKNGLFGNIIALALGLTPNFKSNFDLTEDAKLQLSKDTYDDDLDELLGQIGDQYADLFLAAKNLSDAILLSDILRVNSEITKAPLSASMVKRYDEHHQDLALLKTLVRQQLPEKYKEIFSDQSKNGYAGYIDIGIKHQKQTTKLTSQEEFYKFIKPILEKMDGAEELLAKLNREDLLRKQRTFDNGSIPHQIHLGELHAILRRQEEFYPFLKDNREKIEKILTFRIPYYVGPLARGNSRFAWMTRKSDEAITPWNFEEVVDKGASAQSFIERMTNFDEYLPNKKVLPKHSLLYEYFTVYNELTKVKYVTEGMRKPEFLSGEQKEAIVDLLFKTNRKVTVKQLKEDYFKKIECFDSVEIIGVEDRFNASLGTYHDLLKIIKDKDFLDNEENEDILEDIVLTLTLFEDREMIEERLKKYANLFDDKVMKQLKRRHYTGWGRLSRKMINGIRDKQSGKTILDFLKSDGFSNRNFMQLIHDDSLTFKEEIEKAQVSGQGDSLHEQIADLAGSPAIKKGILQTVKIVDELVKVMGHKPENIVIEMARENQTTTKGLQQSRERKKRGGSAGGTGGSGGLSEADKAGFIKRQLVETRQITKHVARILDSRMNTKRDKNDKPIREVKVITLKSKLVSDFRKDFQLYKVRDINNYHHAHDAYLNAVVGTALIKKYPKLESEFVYGDYKVYDVRKMIAKSEQEIGKATAKRFFYSNIMNFFKTEVKLANGEIRKRPLIETNGETGEVVWNKEKDFATVRKVLAMPQVNIVKKTEVQTGGFSKESILSKRESAKLIPRKKGWDTRKYGGFGSPTVAYSILVVAKVEKGKAKKLKSVKVLVGITIMEKGSYEKDPIGFLEAKGYKDIKKELIFKLPKYSLFELENGRRRMLASATELQKANELVLPQHLVRLLYYTQNISATTGSNNLGYIEQHREEFKEIFEKIIDFSEKYILKNKVNSNLKSSFDEQFAVSDSILLSNSFVSLLKYTSFGAGGSGPKRKVSSAEGAAKEEPKRRSARLSAKPPAKVEAKPKKAAAKDKSSDKKVQTKGKRGAKGKQAEVANQETKEDLPAENGETKTEESPASDEAGEKEAKSDGGSGYQTVTEVLDATLIYQSITGLYETRTDLSQLGGDKRPAATKKAGQAKKKK

SEQ ID NO: 470 - protein, 1493 aa, Artificial Sequence
  dScCasFok, SV40+nucleoplasmin, ancestral mutations, Scloop QQmutation, HNH deletion, PAM replaced with STO7 D4719
  misc_feature: synthetic
MAVTPKKKRKVGGSGSQLVKSELEEKKSELRHKLKYVPHEYIELIEIARNSTQDRILEMKVMEFFMKVYGYRGKHLGGSRKPDGAIYTVGSPIDYGVIVDTKAYSGGYNLPIGQADEMQRYVEENQTRNKHINPNEWWKVYPSSVTEFKFLFVSGHFKGNYKAQLTRLNHITNCNGAVLSVEELLIGGEMIKAGTLTLEEVRRKFNNGEINFSGSETPGTSESATPESMDKKYSIGLAIGTNSVGWAVITDDYKVPSKKMKVLGNTDRQSIKKNLIGALLFDSGETAEATRLKRTARRRYTRRKNRICYLQEIFANEMAKLDDSFFHRLEESFLVEEDKKHERHPIFGNLVDEVAYHENYPTIYHLRKKLADSTEKADLRLIYLALAHMIKFRGHFLIEGDLNAENSDVDKLFIQLVQTYNQLFEENPINESGVDAKAILSARLSKSRRLENLIAQFPGEKKNGLFGNIIALALGLTPNFKSNFDLTEDAKLQLSKDTYDDDLDELLGQIGDQYADLFLAAKNLSDAILLSDILRVNSEITKAPLSASMVKRYDEHHQDLALLKTLVRQQLPEKYKEIFSDQSKNGYAGYIDIGIKHQKQTTKLTSQEEFYKFIKPILEKMDGAEELLAKLNREDLLRKQRTFDNGSIPHQIHLGELHAILRRQEEFYPFLKDNREKIEKILTFRIPYYVGPLARGNSRFAWMTRKSDEAITPWNFEEVVDKGASAQSFIERMTNFDEYLPNKKVLPKHSLLYEYFTVYNELTKVKYVTEGMRKPEFLSGEQKEAIVDLLFKTNRKVTVKQLKEDYFKKIECFDSVEIIGVEDRFNASLGTYHDLLKIIKDKDFLDNEENEDILEDIVLTLTLFEDREMIEERLKKYANLFDDKVMKQLKRRHYTGWGRLSRKMINGIRDKQSGKTILDFLKSDGFSNRNFMQLIHDDSLTFKEEIEKAQVSGQGDSLHEQIADLAGSPAIKKGILQTVKIVDELVKVMGHKPENIVIEMARENQTTTKGLQQSRERKKRGGSAGGTGGSGGLSEADKAGFIKRQLVETRQITKHVARILDSRMNTKRDKNDKPIREVKVITLKSKLVSDFRKDFQLYKVRDINNYHHAHDAYLNAVVGTALIKKYPKLESEFVYGDYKVYDVRKMIAKSEQEIGKATAKRFFYSNIMNFFKTEVKLANGEIRKRPLIETNGETGEVVWNKEKDFATVRKVLAMPQVNIVKKTEVQTGGFSKESILSKRESAKLIPRKKGWDTRKYGGFGSPTVAYSILVVAKVEKGKAKKLKSVKVLVGITIMEKGSYEKDPIGFLEAKGYKDIKKELIFKLPKYSLFELENGRRRMLASATELQKAGGSAGGTGGSAGGVTVKFKYKGEEKEVDISKIKKVWRVGKMISFTYDDNGKTGRGAVSEKDAPKELLQMLEKSGKKGGSAGGTGGSAGGYQTVTEVLDATLIYQSITGLYETRTDLSQLGGDKRPAATKKAGQAKKKKPKKKRKV

SEQ ID NO: 471 - protein, 1536 aa, Artificial Sequence
  dScCasFok, SV40+nucleoplasmin, ancestral mutations, Scloop AAmutation, HNH deletion, PAM replaced with Zinc finger D4720
  misc_feature: synthetic
MAVTPKKKRKVGGSGSQLVKSELEEKKSELRHKLKYVPHEYIELIEIARNSTQDRILEMKVMEFFMKVYGYRGKHLGGSRKPDGAIYTVGSPIDYGVIVDTKAYSGGYNLPIGQADEMQRYVEENQTRNKHINPNEWWKVYPSSVTEFKFLFVSGHFKGNYKAQLTRLNHITNCNGAVLSVEELLIGGEMIKAGTLTLEEVRRKFNNGEINFSGSETPGTSESATPESMDKKYSIGLAIGTNSVGWAVITDDYKVPSKKMKVLGNTDRQSIKKNLIGALLFDSGETAEATRLKRTARRRYTRRKNRICYLQEIFANEMAKLDDSFFHRLEESFLVEEDKKHERHPIFGNLVDEVAYHENYPTIYHLRKKLADSTEKADLRLIYLALAHMIKFRGHFLIEGDLNAENSDVDKLFIQLVQTYNQLFEENPINESGVDAKAILSARLSKSRRLENLIAQFPGEKKNGLFGNIIALALGLTPNFKSNFDLTEDAKLQLSKDTYDDDLDELLGQIGDQYADLFLAAKNLSDAILLSDILRVNSEITKAPLSASMVKRYDEHHQDLALLKTLVRQQLPEKYKEIFSDQSKNGYAGYIDIGIKHAKATTKLTSQEEFYKFIKPILEKMDGAEELLAKLNREDLLRKQRTFDNGSIPHQIHLGELHAILRRQEEFYPFLKDNREKIEKILTFRIPYYVGPLARGNSRFAWMTRKSDEAITPWNFEEVVDKGASAQSFIERMTNFDEYLPNKKVLPKHSLLYEYFTVYNELTKVKYVTEGMRKPEFLSGEQKEAIVDLLFKTNRKVTVKQLKEDYFKKIECFDSVEIIGVEDRFNASLGTYHDLLKIIKDKDFLDNEENEDILEDIVLTLTLFEDREMIEERLKKYANLFDDKVMKQLKRRHYTGWGRLSRKMINGIRDKQSGKTILDFLKSDGFSNRNFMQLIHDDSLTFKEEIEKAQVSGQGDSLHEQIADLAGSPAIKKGILQTVKIVDELVKVMGHKPENIVIEMARENQTTTKGLQQSRERKKRGGSAGGTGGSGGLSEADKAGFIKRQLVETRQITKHVARILDSRMNTKRDKNDKPIREVKVITLKSKLVSDFRKDFQLYKVRDINNYHHAHDAYLNAVVGTALIKKYPKLESEFVYGDYKVYDVRKMIAKSEQEIGKATAKRFFYSNIMNFFKTEVKLANGEIRKRPLIETNGETGEVVWNKEKDFATVRKVLAMPQVNIVKKTEVQTGGFSKESILSKRESAKLIPRKKGWDTRKYGGFGSPTVAYSILVVAKVEKGKAKKLKSVKVLVGITIMEKGSYEKDPIGFLEAKGYKDIKKELIFKLPKYSLFELENGRRRMLASATELQKANELVLPQHLVRLLYYTQNISATTGSNNLGYIEQHREEFKEIFEKIIDFSEKYILKNKVNSNLKSSFDEQFAVSDSILLSNSFVSLLKYTSFGAGGSAGGTGGSAGGSGAPYRCPCRAGCPSLASMQAHMRGHSGGSGYQTVTEVLDATLIYQSITGLYETRTDLSQLGGDKRPAATKKAGQAKKKKGA

SEQ ID NO: 472 - protein, 1453 aa, Artificial Sequence
  dScCasFok, SV40+nucleoplasmin, ancestral mutations, Scloop AAmutation HNH deletion, PAM replaced with LacI DNA binding domain D4721
  misc_feature: synthetic
MAVTPKKKRKVGGSGSQLVKSELEEKKSELRHKLKYVPHEYIELIEIARNSTQDRILEMKVMEFFMKVYGYRGKHLGGSRKPDGAIYTVGSPIDYGVIVDTKAYSGGYNLPIGQADEMQRYVEENQTRNKHINPNEWWKVYPSSVTEFKFLFVSGHFKGNYKAQLTRLNHITNCNGAVLSVEELLIGGEMIKAGTLTLEEVRRKFNNGEINFSGSETPGTSESATPESMDKKYSIGLAIGTNSVGWAVITDDYKVPSKKMKVLGNTDRQSIKKNLIGALLFDSGETAEATRLKRTARRRYTRRKNRICYLQEIFANEMAKLDDSFFHRLEESFLVEEDKKHERHPIFGNLVDEVAYHENYPTIYHLRKKLADSTEKADLRLIYLALAHMIKFRGHFLIEGDLNAENSDVDKLFIQLVQTYNQLFEENPINESGVDAKAILSARLSKSRRLENLIAQFPGEKKNGLFGNIIALALGLTPNFKSNFDLTEDAKLQLSKDTYDDDLDELLGQIGDQYADLFLAAKNLSDAILLSDILRVNSEITKAPLSASMVKRYDEHHQDLALLKTLVRQQLPEKYKEIFSDQSKNGYAGYIDIGIKHAKATTKLTSQEEFYKFIKPILEKMDGAEELLAKLNREDLLRKQRTFDNGSIPHQIHLGELHAILRRQEEFYPFLKDNREKIEKILTFRIPYYVGPLARGNSRFAWMTRKSDEAITPWNFEEVVDKGASAQSFIERMTNFDEYLPNKKVLPKHSLLYEYFTVYNELTKVKYVTEGMRKPEFLSGEQKEAIVDLLFKTNRKVTVKQLKEDYFKKIECFDSVEIIGVEDRFNASLGTYHDLLKIIKDKDFLDNEENEDILEDIVLTLTLFEDREMIEERLKKYANLFDDKVMKQLKRRHYTGWGRLSRKMINGIRDKQSGKTILDFLKSDGFSNRNFMQLIHDDSLTFKEEIEKAQVSGQGDSLHEQIADLAGSPAIKKGILQTVKIVDELVKVMGHKPENIVIEMARENQTTTKGLQQSRERKKRGGSAGGTGGSGGLSEADKAGFIKRQLVETRQITKHVARILDSRMNTKRDKNDKPIREVKVITLKSKLVSDFRKDFQLYKVRDINNYHHAHDAYLNAVVGTALIKKYPKLESEFVYGDYKVYDVRKMIAKSEQEIGKATAKRFFYSNIMNFFKTEVKLANGEIRKRPLIETNGETGEVVWNKEKDFATVRKVLAMPQVNIVKKTEVQTGGFSKESILSKRESAKLIPRKKGWDTRKYGGFGSPTVAYSILVVAKVEKGKAKKLKSVKVLVGITIMEKGSYEKDPIGFLEAKGYKDIKKELIFKLPKYSLFELENGRRRMLASATELQKAGGSGMKPVTLYDVAEYAGVSYQTVSRVVNQASHVSAKTREKVEAAMAELNGGSGYQTVTEVLDATLIYQSITGLYETRTDLSQLGGDKRPAATKKAGQAKKKKGA

SEQ ID NO: 473 - protein, 1473 aa, Artificial Sequence
  dScCasFok, SV40+nucleoplasmin, ancestral mutations, Scloop AAmutation, HNH deletion, PAM replaced with SSO7D D4722
  misc_feature: synthetic
MAVTPKKKRKVGGSGSQLVKSELEEKKSELRHKLKYVPHEYIELIEIARNSTQDRILEMKVMEFFMKVYGYRGKHLGGSRKPDGAIYTVGSPIDYGVIVDTKAYSGGYNLPIGQADEMQRYVEENQTRNKHINPNEWWKVYPSSVTEFKFLFVSGHFKGNYKAQLTRLNHITNCNGAVLSVEELLIGGEMIKAGTLTLEEVRRKFNNGEINFSGSETPGTSESATPESMDKKYSIGLAIGTNSVGWAVITDDYKVPSKKMKVLGNTDRQSIKKNLIGALLFDSGETAEATRLKRTARRRYTRRKNRICYLQEIFANEMAKLDDSFFHRLEESFLVEEDKKHERHPIFGNLVDEVAYHENYPTIYHLRKKLADSTEKADLRLIYLALAHMIKFRGHFLIEGDLNAENSDVDKLFIQLVQTYNQLFEENPINESGVDAKAILSARLSKSRRLENLIAQFPGEKKNGLFGNIIALALGLTPNFKSNFDLTEDAKLQLSKDTYDDDLDELLGQIGDQYADLFLAAKNLSDAILLSDILRVNSEITKAPLSASMVKRYDEHHQDLALLKTLVRQQLPEKYKEIFSDQSKNGYAGYIDIGIKHAKATTKLTSQEEFYKFIKPILEKMDGAEELLAKLNREDLLRKQRTFDNGSIPHQIHLGELHAILRRQEEFYPFLKDNREKIEKILTFRIPYYVGPLARGNSRFAWMTRKSDEAITPWNFEEVVDKGASAQSFIERMTNFDEYLPNKKVLPKHSLLYEYFTVYNELTKVKYVTEGMRKPEFLSGEQKEAIVDLLFKTNRKVTVKQLKEDYFKKIECFDSVEIIGVEDRFNASLGTYHDLLKIIKDKDFLDNEENEDILEDIVLTLTLFEDREMIEERLKKYANLFDDKVMKQLKRRHYTGWGRLSRKMINGIRDKQSGKTILDFLKSDGFSNRNFMQLIHDDSLTFKEEIEKAQVSGQGDSLHEQIADLAGSPAIKKGILQTVKIVDELVKVMGHKPENIVIEMARENQTTTKGLQQSRERKKRGGSAGGTGGSGGLSEADKAGFIKRQLVETRQITKHVARILDSRMNTKRDKNDKPIREVKVITLKSKLVSDFRKDFQLYKVRDINNYHHAHDAYLNAVVGTALIKKYPKLESEFVYGDYKVYDVRKMIAKSEQEIGKATAKRFFYSNIMNFFKTEVKLANGEIRKRPLIETNGETGEVVWNKEKDFATVRKVLAMPQVNIVKKTEVQTGGFSKESILSKRESAKLIPRKKGWDTRKYGGFGSPTVAYSILVVAKVEKGKAKKLKSVKVLVGITIMEKGSYEKDPIGFLEAKGYKDIKKELIFKLPKYSLFELENGRRRMLASATELQKAGGSAGMATVKFKYKGEEKEVDISKIKKVWRVGKMISFTYDEGGGKTGRGAVSEKDAPKELLQMLEKQKKGGSAGYQTVTEVLDATLIYQSITGLYETRTDLSQLGGDKRPAATKKAGQAKKKKGA

SEQ ID NO: 474 - protein, 1597 aa, Artificial Sequence
  dScCasFok, SV40+nucleoplasmin, ancestral mutations, Scloop AAmutation, HNH deletion, PAM replaced with HMGN D4723
  misc_feature: synthetic
MAVTPKKKRKVGGSGSQLVKSELEEKKSELRHKLKYVPHEYIELIEIARNSTQDRILEMKVMEFFMKVYGYRGKHLGGSRKPDGAIYTVGSPIDYGVIVDTKAYSGGYNLPIGQADEMQRYVEENQTRNKHINPNEWWKVYPSSVTEFKFLFVSGHFKGNYKAQLTRLNHITNCNGAVLSVEELLIGGEMIKAGTLTLEEVRRKFNNGEINFSGSETPGTSESATPESMDKKYSIGLAIGTNSVGWAVITDDYKVPSKKMKVLGNTDRQSIKKNLIGALLFDSGETAEATRLKRTARRRYTRRKNRICYLQEIFANEMAKLDDSFFHRLEESFLVEEDKKHERHPIFGNLVDEVAYHENYPTIYHLRKKLADSTEKADLRLIYLALAHMIKFRGHFLIEGDLNAENSDVDKLFIQLVQTYNQLFEENPINESGVDAKAILSARLSKSRRLENLIAQFPGEKKNGLFGNIIALALGLTPNFKSNFDLTEDAKLQLSKDTYDDDLDELLGQIGDQYADLFLAAKNLSDAILLSDILRVNSEITKAPLSASMVKRYDEHHQDLALLKTLVRQQLPEKYKEIFSDQSKNGYAGYIDIGIKHAKATTKLTSQEEFYKFIKPILEKMDGAEELLAKLNREDLLRKQRTFDNGSIPHQIHLGELHAILRRQEEFYPFLKDNREKIEKILTFRIPYYVGPLARGNSRFAWMTRKSDEAITPWNFEEVVDKGASAQSFIERMTNFDEYLPNKKVLPKHSLLYEYFTVYNELTKVKYVTEGMRKPEFLSGEQKEAIVDLLFKTNRKVTVKQLKEDYFKKIECFDSVEIIGVEDRFNASLGTYHDLLKIIKDKDFLDNEENEDILEDIVLTLTLFEDREMIEERLKKYANLFDDKVMKQLKRRHYTGWGRLSRKMINGIRDKQSGKTILDFLKSDGFSNRNFMQLIHDDSLTFKEEIEKAQVSGQGDSLHEQIADLAGSPAIKKGILQTVKIVDELVKVMGHKPENIVIEMARENQTTTKGLQQSRERKKRGGSAGGTGGSGGLSEADKAGFIKRQLVETRQITKHVARILDSRMNTKRDKNDKPIREVKVITLKSKLVSDFRKDFQLYKVRDINNYHHAHDAYLNAVVGTALIKKYPKLESEFVYGDYKVYDVRKMIAKSEQEIGKATAKRFFYSNIMNFFKTEVKLANGEIRKRPLIETNGETGEVVWNKEKDFATVRKVLAMPQVNIVKKTEVQTGGFSKESILSKRESAKLIPRKKGWDTRKYGGFGSPTVAYSILVVAKVEKGKAKKLKSVKVLVGITIMEKGSYEKDPIGFLEAKGYKDIKKELIFKLPKYSLFELENGRRRMLASATELQKANELVLPQHLVRLLYYTQNISATTGSNNLGYIEQHREEFKEIFEKIIDFSEKYILKNKVNSNLKSSFDEQFAVSDSILLSNSFVSLLKYTSFGAGGSGPKRKVSSAEGAAKEEPKRRSARLSAKPPAKVEAKPKKAAAKDKSSDKKVQTKGKRGAKGKQAEVANQETKEDLPAENGETKTEESPASDEAGEKEAKSDGGSGYQTVTEVLDATLIYQSITGLYETRTDLSQLGGDKRPAATKKAGQAKKKK

SEQ ID NO: 475 - protein, 1493 aa, Artificial Sequence
  dScCasFok, SV40+nucleoplasmin, ancestral mutations, Scloop AAmutation, HNH deletion, PAM GAreplaced with STO7 D4724
  misc_feature: synthetic
MAVTPKKKRKVGGSGSQLVKSELEEKKSELRHKLKYVPHEYIELIEIARNSTQDRILEMKVMEFFMKVYGYRGKHLGGSRKPDGAIYTVGSPIDYGVIVDTKAYSGGYNLPIGQADEMQRYVEENQTRNKHINPNEWWKVYPSSVTEFKFLFVSGHFKGNYKAQLTRLNHITNCNGAVLSVEELLIGGEMIKAGTLTLEEVRRKFNNGEINFSGSETPGTSESATPESMDKKYSIGLAIGTNSVGWAVITDDYKVPSKKMKVLGNTDRQSIKKNLIGALLFDSGETAEATRLKRTARRRYTRRKNRICYLQEIFANEMAKLDDSFFHRLEESFLVEEDKKHERHPIFGNLVDEVAYHENYPTIYHLRKKLADSTEKADLRLIYLALAHMIKFRGHFLIEGDLNAENSDVDKLFIQLVQTYNQLFEENPINESGVDAKAILSARLSKSRRLENLIAQFPGEKKNGLFGNIIALALGLTPNFKSNFDLTEDAKLQLSKDTYDDDLDELLGQIGDQYADLFLAAKNLSDAILLSDILRVNSEITKAPLSASMVKRYDEHHQDLALLKTLVRQQLPEKYKEIFSDQSKNGYAGYIDIGIKHAKATTKLTSQEEFYKFIKPILEKMDGAEELLAKLNREDLLRKQRTFDNGSIPHQIHLGELHAILRRQEEFYPFLKDNREKIEKILTFRIPYYVGPLARGNSRFAWMTRKSDEAITPWNFEEVVDKGASAQSFIERMTNFDEYLPNKKVLPKHSLLYEYFTVYNELTKVKYVTEGMRKPEFLSGEQKEAIVDLLFKTNRKVTVKQLKEDYFKKIECFDSVEIIGVEDRFNASLGTYHDLLKIIKDKDFLDNEENEDILEDIVLTLTLFEDREMIEERLKKYANLFDDKVMKQLKRRHYTGWGRLSRKMINGIRDKQSGKTILDFLKSDGFSNRNFMQLIHDDSLTFKEEIEKAQVSGQGDSLHEQIADLAGSPAIKKGILQTVKIVDELVKVMGHKPENIVIEMARENQTTTKGLQQSRERKKRGGSAGGTGGSGGLSEADKAGFIKRQLVETRQITKHVARILDSRMNTKRDKNDKPIREVKVITLKSKLVSDFRKDFQLYKVRDINNYHHAHDAYLNAVVGTALIKKYPKLESEFVYGDYKVYDVRKMIAKSEQEIGKATAKRFFYSNIMNFFKTEVKLANGEIRKRPLIETNGETGEVVWNKEKDFATVRKVLAMPQVNIVKKTEVQTGGFSKESILSKRESAKLIPRKKGWDTRKYGGFGSPTVAYSILVVAKVEKGKAKKLKSVKVLVGITIMEKGSYEKDPIGFLEAKGYKDIKKELIFKLPKYSLFELENGRRRMLASATELQKAGGSAGGTGGSAGGVTVKFKYKGEEKEVDISKIKKVWRVGKMISFTYDDNGKTGRGAVSEKDAPKELLQMLEKSGKKGGSAGGTGGSAGGYQTVTEVLDATLIYQSITGLYETRTDLSQLGGDKRPAATKKAGQAKKKKPKKKRKV

SEQ ID NO: 476 - protein, 1526 aa, Artificial Sequence
  dScCasFok, SV40+nucleoplasmin, ancestral mutations, Scloop SpReplacement, HNH deletion, PAM replaced with Zinc finger D4725
  misc_feature: synthetic
MAVTPKKKRKVGGSGSQLVKSELEEKKSELRHKLKYVPHEYIELIEIARNSTQDRILEMKVMEFFMKVYGYRGKHLGGSRKPDGAIYTVGSPIDYGVIVDTKAYSGGYNLPIGQADEMQRYVEENQTRNKHINPNEWWKVYPSSVTEFKFLFVSGHFKGNYKAQLTRLNHITNCNGAVLSVEELLIGGEMIKAGTLTLEEVRRKFNNGEINFSGSETPGTSESATPESMDKKYSIGLAIGTNSVGWAVITDDYKVPSKKMKVLGNTDRQSIKKNLIGALLFDSGETAEATRLKRTARRRYTRRKNRICYLQEIFANEMAKLDDSFFHRLEESFLVEEDKKHERHPIFGNLVDEVAYHENYPTIYHLRKKLADSTEKADLRLIYLALAHMIKFRGHFLIEGDLNAENSDVDKLFIQLVQTYNQLFEENPINESGVDAKAILSARLSKSRRLENLIAQFPGEKKNGLFGNIIALALGLTPNFKSNFDLTEDAKLQLSKDTYDDDLDELLGQIGDQYADLFLAAKNLSDAILLSDILRVNSEITKAPLSASMIKRYDEHHQDLTLLKALVRQQLPEKYKEIFFDQSKNGYAGYIDGGASQEEFYKFIKPILEKMDGTEELLVKLNREDLLRKQRTFDNGSIPHQIHLGELHAILRRQEDFYPFLKDNREKIEKILTFRIPYYVGPLARGNSRFAWMTRKSEETITPWNFEEVVDKGASAQSFIERMTNFDEYLPNKKVLPKHSLLYEYFTVYNELTKVKYVTEGMRKPEFLSGEQKEAIVDLLFKTNRKVTVKQLKEDYFKKIECFDSVEIIGVEDRFNASLGTYHDLLKIIKDKDFLDNEENEDILEDIVLTLTLFEDREMIEERLKKYANLFDDKVMKQLKRRHYTGWGRLSRKMINGIRDKQSGKTILDFLKSDGFSNRNFMQLIHDDSLTFKEEIEKAQVSGQGDSLHEQIADLAGSPAIKKGILQTVKIVDELVKVMGHKPENIVIEMARENQTTTKGLQQSRERKKRGGSAGGTGGSGGLSEADKAGFIKRQLVETRQITKHVARILDSRMNTKRDKNDKPIREVKVITLKSKLVSDFRKDFQLYKVRDINNYHHAHDAYLNAVVGTALIKKYPKLESEFVYGDYKVYDVRKMIAKSEQEIGKATAKRFFYSNIMNFFKTEVKLANGEIRKRPLIETNGETGEVVWNKEKDFATVRKVLAMPQVNIVKKTEVQTGGFSKESILSKRESAKLIPRKKGWDTRKYGGFGSPTVAYSILVVAKVEKGKAKKLKSVKVLVGITIMEKGSYEKDPIGFLEAKGYKDIKKELIFKLPKYSLFELENGRRRMLASATELQKANELVLPQHLVRLLYYTQNISATTGSNNLGYIEQHREEFKEIFEKIIDFSEKYILKNKVNSNLKSSFDEQFAVSDSILLSNSFVSLLKYTSFGAGGSAGGTGGSAGGSGAPYRCPCRAGCPSLASMQAHMRGHSGGSGYQTVTEVLDATLIYQSITGLYETRTDLSQLGGDKRPAATKKAGQAKKKKGA

SEQ ID NO: 477 - protein, 1443 aa, Artificial Sequence
  dScCasFok, SV40+nucleoplasmin, ancestral mutations, Scloop SpReplacement HNH deletion, PAM replaced with LacI DNA binding domain D4726
  misc_feature: synthetic
MAVTPKKKRKVGGSGSQLVKSELEEKKSELRHKLKYVPHEYIELIEIARNSTQDRILEMKVMEFFMKVYGYRGKHLGGSRKPDGAIYTVGSPIDYGVIVDTKAYSGGYNLPIGQADEMQRYVEENQTRNKHINPNEWWKVYPSSVTEFKFLFVSGHFKGNYKAQLTRLNHITNCNGAVLSVEELLIGGEMIKAGTLTLEEVRRKFNNGEINFSGSETPGTSESATPESMDKKYSIGLAIGTNSVGWAVITDDYKVPSKKMKVLGNTDRQSIKKNLIGALLFDSGETAEATRLKRTARRRYTRRKNRICYLQEIFANEMAKLDDSFFHRLEESFLVEEDKKHERHPIFGNLVDEVAYHENYPTIYHLRKKLADSTEKADLRLIYLALAHMIKFRGHFLIEGDLNAENSDVDKLFIQLVQTYNQLFEENPINESGVDAKAILSARLSKSRRLENLIAQFPGEKKNGLFGNIIALALGLTPNFKSNFDLTEDAKLQLSKDTYDDDLDELLGQIGDQYADLFLAAKNLSDAILLSDILRVNSEITKAPLSASMIKRYDEHHQDLTLLKALVRQQLPEKYKEIFFDQSKNGYAGYIDGGASQEEFYKFIKPILEKMDGTEELLVKLNREDLLRKQRTFDNGSIPHQIHLGELHAILRRQEDFYPFLKDNREKIEKILTFRIPYYVGPLARGNSRFAWMTRKSEETITPWNFEEVVDKGASAQSFIERMTNFDEYLPNKKVLPKHSLLYEYFTVYNELTKVKYVTEGMRKPEFLSGEQKEAIVDLLFKTNRKVTVKQLKEDYFKKIECFDSVEIIGVEDRFNASLGTYHDLLKIIKDKDFLDNEENEDILEDIVLTLTLFEDREMIEERLKKYANLFDDKVMKQLKRRHYTGWGRLSRKMINGIRDKQSGKTILDFLKSDGFSNRNFMQLIHDDSLTFKEEIEKAQVSGQGDSLHEQIADLAGSPAIKKGILQTVKIVDELVKVMGHKPENIVIEMARENQTTTKGLQQSRERKKRGGSAGGTGGSGGLSEADKAGFIKRQLVETRQITKHVARILDSRMNTKRDKNDKPIREVKVITLKSKLVSDFRKDFQLYKVRDINNYHHAHDAYLNAVVGTALIKKYPKLESEFVYGDYKVYDVRKMIAKSEQEIGKATAKRFFYSNIMNFFKTEVKLANGEIRKRPLIETNGETGEVVWNKEKDFATVRKVLAMPQVNIVKKTEVQTGGFSKESILSKRESAKLIPRKKGWDTRKYGGFGSPTVAYSILVVAKVEKGKAKKLKSVKVLVGITIMEKGSYEKDPIGFLEAKGYKDIKKELIFKLPKYSLFELENGRRRMLASATELQKAGGSGMKPVTLYDVAEYAGVSYQTVSRVVNQASHVSAKTREKVEAAMAELNGGSGYQTVTEVLDATLIYQSITGLYETRTDLSQLGGDKRPAATKKAGQAKKKKGA

SEQ ID NO: 478 - protein, 1463 aa, Artificial Sequence
  dScCasFok, SV40+nucleoplasmin, ancestral mutations, Scloop SpReplacement HNH deletion, PAM replaced with SSO7D D4727
  misc_feature: synthetic
MAVTPKKKRKVGGSGSQLVKSELEEKKSELRHKLKYVPHEYIELIEIARNSTQDRILEMKVMEFFMKVYGYRGKHLGGSRKPDGAIYTVGSPIDYGVIVDTKAYSGGYNLPIGQADEMQRYVEENQTRNKHINPNEWWKVYPSSVTEFKFLFVSGHFKGNYKAQLTRLNHITNCNGAVLSVEELLIGGEMIKAGTLTLEEVRRKFNNGEINFSGSETPGTSESATPESMDKKYSIGLAIGTNSVGWAVITDDYKVPSKKMKVLGNTDRQSIKKNLIGALLFDSGETAEATRLKRTARRRYTRRKNRICYLQEIFANEMAKLDDSFFHRLEESFLVEEDKKHERHPIFGNLVDEVAYHENYPTIYHLRKKLADSTEKADLRLIYLALAHMIKFRGHFLIEGDLNAENSDVDKLFIQLVQTYNQLFEENPINESGVDAKAILSARLSKSRRLENLIAQFPGEKKNGLFGNIIALALGLTPNFKSNFDLTEDAKLQLSKDTYDDDLDELLGQIGDQYADLFLAAKNLSDAILLSDILRVNSEITKAPLSASMIKRYDEHHQDLTLLKALVRQQLPEKYKEIFFDQSKNGYAGYIDGGASQEEFYKFIKPILEKMDGTEELLVKLNREDLLRKQRTFDNGSIPHQIHLGELHAILRRQEDFYPFLKDNREKIEKILTFRIPYYVGPLARGNSRFAWMTRKSEETITPWNFEEVVDKGASAQSFIERMTNFDEYLPNKKVLPKHSLLYEYFTVYNELTKVKYVTEGMRKPEFLSGEQKEAIVDLLFKTNRKVTVKQLKEDYFKKIECFDSVEIIGVEDRFNASLGTYHDLLKIIKDKDFLDNEENEDILEDIVLTLTLFEDREMIEERLKKYANLFDDKVMKQLKRRHYTGWGRLSRKMINGIRDKQSGKTILDFLKSDGFSNRNFMQLIHDDSLTFKEEIEKAQVSGQGDSLHEQIADLAGSPAIKKGILQTVKIVDELVKVMGHKPENIVIEMARENQTTTKGLQQSRERKKRGGSAGGTGGSGGLSEADKAGFIKRQLVETRQITKHVARILDSRMNTKRDKNDKPIREVKVITLKSKLVSDFRKDFQLYKVRDINNYHHAHDAYLNAVVGTALIKKYPKLESEFVYGDYKVYDVRKMIAKSEQEIGKATAKRFFYSNIMNFFKTEVKLANGEIRKRPLIETNGETGEVVWNKEKDFATVRKVLAMPQVNIVKKTEVQTGGFSKESILSKRESAKLIPRKKGWDTRKYGGFGSPTVAYSILVVAKVEKGKAKKLKSVKVLVGITIMEKGSYEKDPIGFLEAKGYKDIKKELIFKLPKYSLFELENGRRRMLASATELQKAGGSAGMATVKFKYKGEEKEVDISKIKKVWRVGKMISFTYDEGGGKTGRGAVSEKDAPKELLQMLEKQKKGGSAGYQTVTEVLDATLIYQSITGLYETRTDLSQLGGDKRPAATKKAGQAKKKKGA

SEQ ID NO: 479 - protein, 1587 aa, Artificial Sequence
  dScCasFok, SV40+nucleoplasmin, ancestral mutations, Scloop SpReplacement HNH deletion, PAM replaced with HMGN D4728
  misc_feature: synthetic
MAVTPKKKRKVGGSGSQLVKSELEEKKSELRHKLKYVPHEYIELIEIARNSTQDRILEMKVMEFFMKVYGYRGKHLGGSRKPDGAIYTVGSPIDYGVIVDTKAYSGGYNLPIGQADEMQRYVEENQTRNKHINPNEWWKVYPSSVTEFKFLFVSGHFKGNYKAQLTRLNHITNCNGAVLSVEELLIGGEMIKAGTLTLEEVRRKFNNGEINFSGSETPGTSESATPESMDKKYSIGLAIGTNSVGWAVITDDYKVPSKKMKVLGNTDRQSIKKNLIGALLFDSGETAEATRLKRTARRRYTRRKNRICYLQEIFANEMAKLDDSFFHRLEESFLVEEDKKHERHPIFGNLVDEVAYHENYPTIYHLRKKLADSTEKADLRLIYLALAHMIKFRGHFLIEGDLNAENSDVDKLFIQLVQTYNQLFEENPINESGVDAKAILSARLSKSRRLENLIAQFPGEKKNGLFGNIIALALGLTPNFKSNFDLTEDAKLQLSKDTYDDDLDELLGQIGDQYADLFLAAKNLSDAILLSDILRVNSEITKAPLSASMIKRYDEHHQDLTLLKALVRQQLPEKYKEIFFDQSKNGYAGYIDGGASQEEFYKFIKPILEKMDGTEELLVKLNREDLLRKQRTFDNGSIPHQIHLGELHAILRRQEDFYPFLKDNREKIEKILTFRIPYYVGPLARGNSRFAWMTRKSEETITPWNFEEVVDKGASAQSFIERMTNFDEYLPNKKVLPKHSLLYEYFTVYNELTKVKYVTEGMRKPEFLSGEQKEAIVDLLFKTNRKVTVKQLKEDYFKKIECFDSVEIIGVEDRFNASLGTYHDLLKIIKDKDFLDNEENEDILEDIVLTLTLFEDREMIEERLKKYANLFDDKVMKQLKRRHYTGWGRLSRKMINGIRDKQSGKTILDFLKSDGFSNRNFMQLIHDDSLTFKEEIEKAQVSGQGDSLHEQIADLAGSPAIKKGILQTVKIVDELVKVMGHKPENIVIEMARENQTTTKGLQQSRERKKRGGSAGGTGGSGGLSEADKAGFIKRQLVETRQITKHVARILDSRMNTKRDKNDKPIREVKVITLKSKLVSDFRKDFQLYKVRDINNYHHAHDAYLNAVVGTALIKKYPKLESEFVYGDYKVYDVRKMIAKSEQEIGKATAKRFFYSNIMNFFKTEVKLANGEIRKRPLIETNGETGEVVWNKEKDFATVRKVLAMPQVNIVKKTEVQTGGFSKESILSKRESAKLIPRKKGWDTRKYGGFGSPTVAYSILVVAKVEKGKAKKLKSVKVLVGITIMEKGSYEKDPIGFLEAKGYKDIKKELIFKLPKYSLFELENGRRRMLASATELQKANELVLPQHLVRLLYYTQNISATTGSNNLGYIEQHREEFKEIFEKIIDFSEKYILKNKVNSNLKSSFDEQFAVSDSILLSNSFVSLLKYTSFGAGGSGPKRKVSSAEGAAKEEPKRRSARLSAKPPAKVEAKPKKAAAKDKSSDKKVQTKGKRGAKGKQAEVANQETKEDLPAENGETKTEESPASDEAGEKEAKSDGGSGYQTVTEVLDATLIYQSITGLYETRTDLSQLGGDKRPAATKKAGQAKKKK

SEQ ID NO: 480 - protein, 1483 aa, Artificial Sequence
  dScCasFok, SV40+nucleoplasmin, ancestral mutations, Scloop SpReplacement HNH deletion, PAM replaced with STO7 D4729
  misc_feature: synthetic
MAVTPKKKRKVGGSGSQLVKSELEEKKSELRHKLKYVPHEYIELIEIARNSTQDRILEMKVMEFFMKVYGYRGKHLGGSRKPDGAIYTVGSPIDYGVIVDTKAYSGGYNLPIGQADEMQRYVEENQTRNKHINPNEWWKVYPSSVTEFKFLFVSGHFKGNYKAQLTRLNHITNCNGAVLSVEELLIGGEMIKAGTLTLEEVRRKFNNGEINFSGSETPGTSESATPESMDKKYSIGLAIGTNSVGWAVITDDYKVPSKKMKVLGNTDRQSIKKNLIGALLFDSGETAEATRLKRTARRRYTRRKNRICYLQEIFANEMAKLDDSFFHRLEESFLVEEDKKHERHPIFGNLVDEVAYHENYPTIYHLRKKLADSTEKADLRLIYLALAHMIKFRGHFLIEGDLNAENSDVDKLFIQLVQTYNQLFEENPINESGVDAKAILSARLSKSRRLENLIAQFPGEKKNGLFGNIIALALGLTPNFKSNFDLTEDAKLQLSKDTYDDDLDELLGQIGDQYADLFLAAKNLSDAILLSDILRVNSEITKAPLSASMIKRYDEHHQDLTLLKALVRQQLPEKYKEIFFDQSKNGYAGYIDGGASQEEFYKFIKPILEKMDGTEELLVKLNREDLLRKQRTFDNGSIPHQIHLGELHAILRRQEDFYPFLKDNREKIEKILTFRIPYYVGPLARGNSRFAWMTRKSEETITPWNFEEVVDKGASAQSFIERMTNFDEYLPNKKVLPKHSLLYEYFTVYNELTKVKYVTEGMRKPEFLSGEQKEAIVDLLFKTNRKVTVKQLKEDYFKKIECFDSVEIIGVEDRFNASLGTYHDLLKIIKDKDFLDNEENEDILEDIVLTLTLFEDREMIEERLKKYANLFDDKVMKQLKRRHYTGWGRLSRKMINGIRDKQSGKTILDFLKSDGFSNRNFMQLIHDDSLTFKEEIEKAQVSGQGDSLHEQIADLAGSPAIKKGILQTVKIVDELVKVMGHKPENIVIEMARENQTTTKGLQQSRERKKRGGSAGGTGGSGGLSEADKAGFIKRQLVETRQITKHVARILDSRMNTKRDKNDKPIREVKVITLKSKLVSDFRKDFQLYKVRDINNYHHAHDAYLNAVVGTALIKKYPKLESEFVYGDYKVYDVRKMIAKSEQEIGKATAKRFFYSNIMNFFKTEVKLANGEIRKRPLIETNGETGEVVWNKEKDFATVRKVLAMPQVNIVKKTEVQTGGFSKESILSKRESAKLIPRKKGWDTRKYGGFGSPTVAYSILVVAKVEKGKAKKLKSVKVLVGITIMEKGSYEKDPIGFLEAKGYKDIKKELIFKLPKYSLFELENGRRRMLASATELQKAGGSAGGTGGSAGGVTVKFKYKGEEKEVDISKIKKVWRVGKMISFTYDDNGKTGRGAVSEKDAPKELLQMLEKSGKKGGSAGGTGGSAGGYQTVTEVLDATLIYQSITGLYETRTDLSQLGGDKRPAATKKAGQAKKKKPKKKRKV

SEQ ID NO: 481 - protein, 5 aa, Artificial Sequence
  short positively charged linker
  misc_feature: synthetic
GKSKG

SEQ ID NO: 482 - protein, 100 aa, Artificial Sequence; identical to SEQ ID NO: 324
  Residues 1-100 of HMGN
  misc_feature: synthetic

SEQ ID NO: 483 - protein, 83 aa, Artificial Sequence
  Residues 1-84 of HMGB1
  misc_feature: synthetic
GKGDPKKPRGKMSSYAFFVQTCREEHKKKHPDASVNFSEFSKKCSERWKTMSAKEKGKFEDMAKADKARYEREMKTYIPPKGE

SEQ ID NO: 484 - protein, 79 aa, Artificial Sequence
  Residues 1-79 of HMGB3
  misc_feature: synthetic
MAKGDPKKPKGKMSAYAFFVQTCREEHKKKNPEVPVNFAEFSKKCSERWKTMSGKEKSKFDEMAKADKVRYDREMKDYG

SEQ ID NO: 485 - protein, 15 aa, Artificial Sequence
  HNS linker
  misc_feature: synthetic
AAVKSGTKAKRAQRP

SEQ ID NO: 486 - protein, 194 aa, Artificial Sequence
  Enhanced FokI nuclease domain
  misc_feature: synthetic
VKSELEEKKSELRHKLKYVPHEYIELIEIARNPTQDRILEMKVMEFFMKVYGYRGEHLGGSRKPDGAIYTVGSPIDYGVIVDTKAYSGGYNLPIGQADEMQRYVEENQTRNKHINPNEWWKVYPSSVTEFKFLFVSGHFKGNYKAQLTRLNHITNCNGAVLSVEELLIGGEMIKAGTLTLEEVRRKFNNGEINF

SEQ ID NO: 487 - protein, 1625 aa, Artificial Sequence
  dCasFok, FokI enhanced, SV40+bipartiteSV40
  misc_feature: synthetic
MAVTPKKKRKVGGSGSQLVKSELEEKKSELRHKLKYVPHEYIELIEIARNPTQDRILEMKVMEFFMKVYGYRGEHLGGSRKPDGAIYTVGSPIDYGVIVDTKAYSGGYNLPIGQADEMQRYVEENQTRNKHINPNEWWKVYPSSVTEFKFLFVSGHFKGNYKAQLTRLNHITNCNGAVLSVEELLIGGEMIKAGTLTLEEVRRKFNNGEINFSGSETPGTSESATPESMEKKYSIGLAIGTNSVGWAVITDDYKVPSKKFKVLGNTNRKSIKKNLMGALLFDSGETAEATRLKRTARRRYTRRKNRIRYLQEIFANEMAKLDDSFFQRLEESFLVEEDKKNERHPIFGNLADEVAYHRNYPTIYHLRKKLADSPEKADLRLIYLALAHIIKFRGHFLIEGKLNAENSDVAKLFYQLIQTYNQLFEESPLDEIEVDAKGILSARLSKSKRLEKLIAVFPNEKKNGLFGNIIALALGLTPNFKSNFDLTEDAKLQLSKDTYDDDLDELLGQIGDQYADLFSAAKNLSDAILLSDILRSNSEVTKAPLSASMVKRYDEHHQDLALLKTLVRQQFPEKYAEIFKDDTKNGYAGYVGIGIKHRKRTTKLATQEEFYKFIKPILEKMDGAEELLAKLNRDDLLRKQRTFDNGSIPHQIHLKELHAILRRQEEFYPFLKENREKIEKILTFRIPYYVGPLARGNSRFAWLTRKSEEAITPWNFEEVVDKGASAQSFIERMTNFDEQLPNKKVLPKHSLLYEYFTVYNELTKVKYVTERMRKPEFLSGEQKKAIVDLLFKTNRKVTVKQLKEDYFKKIECFDSVEIIGVEDRFNASLGTYHDLLKIIKDKDFLDNEENEDILEDIVLTLTLFEDREMIEERLKTYAHLFDDKVMKQLKRRHYTGWGRLSRKMINGIRDKQSGKTILDFLKSDGFSNRNFMQLIHDDSLTFKEEIEKAQVSGQGDSLHEQIADLAGSPAIKKGILQTVKIVDELVKVMGHKPENIVIEMARENQTTTKGLQQSRERKKRIEEGIKELESQILKENPVENTQLQNEKLYLYYLQNGRDMYVDQELDINRLSDYDVDAIVPQSFIKDDSIDNKVLTRSVENRGKSDNVPSEEVVKKMKNYWRQLLNAKLITQRKFDNLTKAERGGLSEADKAGFIKRQLVETRQITKHVARILDSRMNTKRDKNDKPIREVKVITLKSKLVSDFRKDFQLYKVRDINNYHHAHDAYLNAVVGTALIKKYPKLESEFVYGDYKVYDVRKMIAKSEQEIGKATAKRFFYSNIMNFFKTEVKLANGEIRKRPLIETNGETGEVVWNKEKDFATVRKVLAMPQVNIVKKTEVQTGGFSKESILSKRESAKLIPRKKGWDTRKYGGFGSPTVAYSILVVAKVEKGKAKKLKSVKVLVGITIMEKGSYEKDPIGFLEAKGYKDIKKELIFKLPKYSLFELENGRRRMLASATELQKANELVLPQHLVRLLYYTQNISATTGSNNLGYIEQHREEFKEIFEKIIDFSEKYILKNKVNSNLKSSFDEQFAVSDSILLSNSFVSLLKYTSFGASGGFTFLDLDVKQGRLRYQTVTEVLDATLIYQSITGLYETRTDLSQLGGDSGGSKRTADGSEFESPKKKRKV

SEQ ID NO: 488 - protein, 1631 aa, Artificial Sequence
  dCasFok, FokI enhanced, SV40+bipartiteSV40, 6His tag
  misc_feature: synthetic
MAVTPKKKRKVGGSGSQLVKSELEEKKSELRHKLKYVPHEYIELIEIARNPTQDRILEMKVMEFFMKVYGYRGEHLGGSRKPDGAIYTVGSPIDYGVIVDTKAYSGGYNLPIGQADEMQRYVEENQTRNKHINPNEWWKVYPSSVTEFKFLFVSGHFKGNYKAQLTRLNHITNCNGAVLSVEELLIGGEMIKAGTLTLEEVRRKFNNGEINFSGSETPGTSESATPESMEKKYSIGLAIGTNSVGWAVITDDYKVPSKKFKVLGNTNRKSIKKNLMGALLFDSGETAEATRLKRTARRRYTRRKNRIRYLQEIFANEMAKLDDSFFQRLEESFLVEEDKKNERHPIFGNLADEVAYHRNYPTIYHLRKKLADSPEKADLRLIYLALAHIIKFRGHFLIEGKLNAENSDVAKLFYQLIQTYNQLFEESPLDEIEVDAKGILSARLSKSKRLEKLIAVFPNEKKNGLFGNIIALALGLTPNFKSNFDLTEDAKLQLSKDTYDDDLDELLGQIGDQYADLFSAAKNLSDAILLSDILRSNSEVTKAPLSASMVKRYDEHHQDLALLKTLVRQQFPEKYAEIFKDDTKNGYAGYVGIGIKHRKRTTKLATQEEFYKFIKPILEKMDGAEELLAKLNRDDLLRKQRTFDNGSIPHQIHLKELHAILRRQEEFYPFLKENREKIEKILTFRIPYYVGPLARGNSRFAWLTRKSEEAITPWNFEEVVDKGASAQSFIERMTNFDEQLPNKKVLPKHSLLYEYFTVYNELTKVKYVTERMRKPEFLSGEQKKAIVDLLFKTNRKVTVKQLKEDYFKKIECFDSVEIIGVEDRFNASLGTYHDLLKIIKDKDFLDNEENEDILEDIVLTLTLFEDREMIEERLKTYAHLFDDKVMKQLKRRHYTGWGRLSRKMINGIRDKQSGKTILDFLKSDGFSNRNFMQLIHDDSLTFKEEIEKAQVSGQGDSLHEQIADLAGSPAIKKGILQTVKIVDELVKVMGHKPENIVIEMARENQTTTKGLQQSRERKKRIEEGIKELESQILKENPVENTQLQNEKLYLYYLQNGRDMYVDQELDINRLSDYDVDAIVPQSFIKDDSIDNKVLTRSVENRGKSDNVPSEEVVKKMKNYWRQLLNAKLITQRKFDNLTKAERGGLSEADKAGFIKRQLVETRQITKHVARILDSRMNTKRDKNDKPIREVKVITLKSKLVSDFRKDFQLYKVRDINNYHHAHDAYLNAVVGTALIKKYPKLESEFVYGDYKVYDVRKMIAKSEQEIGKATAKRFFYSNIMNFFKTEVKLANGEIRKRPLIETNGETGEVVWNKEKDFATVRKVLAMPQVNIVKKTEVQTGGFSKESILSKRESAKLIPRKKGWDTRKYGGFGSPTVAYSILVVAKVEKGKAKKLKSVKVLVGITIMEKGSYEKDPIGFLEAKGYKDIKKELIFKLPKYSLFELENGRRRMLASATELQKANELVLPQHLVRLLYYTQNISATTGSNNLGYIEQHREEFKEIFEKIIDFSEKYILKNKVNSNLKSSFDEQFAVSDSILLSNSFVSLLKYTSFGASGGFTFLDLDVKQGRLRYQTVTEVLDATLIYQSITGLYETRTDLSQLGGDSGGSKRTADGSEFESPKKKRKVHHHHHH

SEQ ID NO: 489 - protein, 1625 aa, Artificial Sequence
  dCasFok, FokI enhanced, SV40+bipartiteSV40, ancestral mutations in RuvC+REC1/2 domain
  misc_feature: synthetic
MAVTPKKKRKVGGSGSQLVKSELEEKKSELRHKLKYVPHEYIELIEIARNPTQDRILEMKVMEFFMKVYGYRGEHLGGSRKPDGAIYTVGSPIDYGVIVDTKAYSGGYNLPIGQADEMQRYVEENQTRNKHINPNEWWKVYPSSVTEFKFLFVSGHFKGNYKAQLTRLNHITNCNGAVLSVEELLIGGEMIKAGTLTLEEVRRKFNNGEINFSGSETPGTSESATPESMDKKYSIGLAIGTNSVGWAVITDDYKVPSKKMKVLGNTDRQSIKKNLIGALLFDSGETAEATRLKRTARRRYTRRKNRICYLQEIFANEMAKLDDSFFHRLEESFLVEEDKKHERHPIFGNLVDEVAYHENYPTIYHLRKKLADSTEKADLRLIYLALAHMIKFRGHFLIEGDLNAENSDVDKLFIQLVQTYNQLFEENPINESGVDAKAILSARLSKSRRLENLIAQFPGEKKNGLFGNIIALALGLTPNFKSNFDLTEDAKLQLSKDTYDDDLDELLGQIGDQYADLFLAAKNLSDAILLSDILRVNSEITKAPLSASMVKRYDEHHQDLALLKTLVRQQLPEKYKEIFSDQSKNGYAGYIDIGIKHRKRTTKRTSQEEFYKFIKPILEKMDGAEELLAKLNREDLLRKQRTFDNGSIPHQIHLGELHAILRRQEEFYPFLKDNREKIEKILTFRIPYYVGPLARGNSRFAWMTRKSDEAITPWNFEEVVDKGASAQSFIERMTNFDEYLPNKKVLPKHSLLYEYFTVYNELTKVKYVTEGMRKPEFLSGEQKEAIVDLLFKTNRKVTVKQLKEDYFKKIECFDSVEIIGVEDRFNASLGTYHDLLKIIKDKDFLDNEENEDILEDIVLTLTLFEDREMIEERLKKYANLFDDKVMKQLKRRHYTGWGRLSRKMINGIRDKQSGKTILDFLKSDGFSNRNFMQLIHDDSLTFKEEIEKAQVSGQGDSLHEQIADLAGSPAIKKGILQTVKIVDELVKVMGHKPENIVIEMARENQTTTKGLQQSRERKKRIEEGIKELESQILKENPVENTQLQNEKLYLYYLQNGRDMYVDQELDINRLSDYDVDAIVPQSFIKDDSIDNKVLTRSVENRGKSDNVPSEEVVKKMKNYWRQLLNAKLITQRKFDNLTKAERGGLSEADKAGFIKRQLVETRQITKHVARILDSRMNTKRDKNDKPIREVKVITLKSKLVSDFRKDFQLYKVRDINNYHHAHDAYLNAVVGTALIKKYPKLESEFVYGDYKVYDVRKMIAKSEQEIGKATAKRFFYSNIMNFFKTEVKLANGEIRKRPLIETNGETGEVVWNKEKDFATVRKVLAMPQVNIVKKTEVQTGGFSKESILSKRESAKLIPRKKGWDTRKYGGFGSPTVAYSILVVAKVEKGKAKKLKSVKVLVGITIMEKGSYEKDPIGFLEAKGYKDIKKELIFKLPKYSLFELENGRRRMLASATELQKANELVLPQHLVRLLYYTQNISATTGSNNLGYIEQHREEFKEIFEKIIDFSEKYILKNKVNSNLKSSFDEQFAVSDSILLSNSFVSLLKYTSFGASGGFTFLDLDVKQGRLRYQTVTEVLDATLIYQSITGLYETRTDLSQLGGDSGGSKRTADGSEFESPKKKRKV

SEQ ID NO: 490 - protein, 1631 aa, Artificial Sequence
  dCasFok, FokI enhanced, SV40+bipartiteSV40, ancestral mutations in RuvC+REC1/2 domain, 6His tag
  misc_feature: synthetic
MAVTPKKKRKVGGSGSQLVKSELEEKKSELRHKLKYVPHEYIELIEIARNPTQDRILEMKVMEFFMKVYGYRGEHLGGSRKPDGAIYTVGSPIDYGVIVDTKAYSGGYNLPIGQADEMQRYVEENQTRNKHINPNEWWKVYPSSVTEFKFLFVSGHFKGNYKAQLTRLNHITNCNGAVLSVEELLIGGEMIKAGTLTLEEVRRKFNNGEINFSGSETPGTSESATPESMDKKYSIGLAIGTNSVGWAVITDDYKVPSKKMKVLGNTDRQSIKKNLIGALLFDSGETAEATRLKRTARRRYTRRKNRICYLQEIFANEMAKLDDSFFHRLEESFLVEEDKKHERHPIFGNLVDEVAYHENYPTIYHLRKKLADSTEKADLRLIYLALAHMIKFRGHFLIEGDLNAENSDVDKLFIQLVQTYNQLFEENPINESGVDAKAILSARLSKSRRLENLIAQFPGEKKNGLFGNIIALALGLTPNFKSNFDLTEDAKLQLSKDTYDDDLDELLGQIGDQYADLFLAAKNLSDAILLSDILRVNSEITKAPLSASMVKRYDEHHQDLALLKTLVRQQLPEKYKEIFSDQSKNGYAGYIDIGIKHRKRTTKRTSQEEFYKFIKPILEKMDGAEELLAKLNREDLLRKQRTFDNGSIPHQIHLGELHAILRRQEEFYPFLKDNREKIEKILTFRIPYYVGPLARGNSRFAWMTRKSDEAITPWNFEEVVDKGASAQSFIERMTNFDEYLPNKKVLPKHSLLYEYFTVYNELTKVKYVTEGMRKPEFLSGEQKEAIVDLLFKTNRKVTVKQLKEDYFKKIECFDSVEIIGVEDRFNASLGTYHDLLKIIKDKDFLDNEENEDILEDIVLTLTLFEDREMIEERLKKYANLFDDKVMKQLKRRHYTGWGRLSRKMINGIRDKQSGKTILDFLKSDGFSNRNFMQLIHDDSLTFKEEIEKAQVSGQGDSLHEQIADLAGSPAIKKGILQTVKIVDELVKVMGHKPENIVIEMARENQTTTKGLQQSRERKKRIEEGIKELESQILKENPVENTQLQNEKLYLYYLQNGRDMYVDQELDINRLSDYDVDAIVPQSFIKDDSIDNKVLTRSVENRGKSDNVPSEEVVKKMKNYWRQLLNAKLITQRKFDNLTKAERGGLSEADKAGFIKRQLVETRQITKHVARILDSRMNTKRDKNDKPIREVKVITLKSKLVSDFRKDFQLYKVRDINNYHHAHDAYLNAVVGTALIKKYPKLESEFVYGDYKVYDVRKMIAKSEQEIGKATAKRFFYSNIMNFFKTEVKLANGEIRKRPLIETNGETGEVVWNKEKDFATVRKVLAMPQVNIVKKTEVQTGGFSKESILSKRESAKLIPRKKGWDTRKYGGFGSPTVAYSILVVAKVEKGKAKKLKSVKVLVGITIMEKGSYEKDPIGFLEAKGYKDIKKELIFKLPKYSLFELENGRRRMLASATELQKANELVLPQHLVRLLYYTQNISATTGSNNLGYIEQHREEFKEIFEKIIDFSEKYILKNKVNSNLKSSFDEQFAVSDSILLSNSFVSLLKYTSFGASGGFTFLDLDVKQGRLRYQTVTEVLDATLIYQSITGLYETRTDLSQLGGDSGGSKRTADGSEFESPKKKRKVHHHHHH

SEQ ID NO: 491 - protein, 1513 aa, Artificial Sequence
  dCasFok, FokI enhanced, SV40+bipartiteSV40, ancestral mutations in RuvC+REC1/2 domain, HNH deletion longer linker
  misc_feature: synthetic
MAVTPKKKRKVGGSGSQLVKSELEEKKSELRHKLKYVPHEYIELIEIARNPTQDRILEMKVMEFFMKVYGYRGEHLGGSRKPDGAIYTVGSPIDYGVIVDTKAYSGGYNLPIGQADEMQRYVEENQTRNKHINPNEWWKVYPSSVTEFKFLFVSGHFKGNYKAQLTRLNHITNCNGAVLSVEELLIGGEMIKAGTLTLEEVRRKFNNGEINFSGSETPGTSESATPESMDKKYSIGLAIGTNSVGWAVITDDYKVPSKKMKVLGNTDRQSIKKNLIGALLFDSGETAEATRLKRTARRRYTRRKNRICYLQEIFANEMAKLDDSFFHRLEESFLVEEDKKHERHPIFGNLVDEVAYHENYPTIYHLRKKLADSTEKADLRLIYLALAHMIKFRGHFLIEGDLNAENSDVDKLFIQLVQTYNQLFEENPINESGVDAKAILSARLSKSRRLENLIAQFPGEKKNGLFGNIIALALGLTPNFKSNFDLTEDAKLQLSKDTYDDDLDELLGQIGDQYADLFLAAKNLSDAILLSDILRVNSEITKAPLSASMVKRYDEHHQDLALLKTLVRQQLPEKYKEIFSDQSKNGYAGYIDIGIKHRKRTTKRTSQEEFYKFIKPILEKMDGAEELLAKLNREDLLRKQRTFDNGSIPHQIHLGELHAILRRQEEFYPFLKDNREKIEKILTFRIPYYVGPLARGNSRFAWMTRKSDEAITPWNFEEVVDKGASAQSFIERMTNFDEYLPNKKVLPKHSLLYEYFTVYNELTKVKYVTEGMRKPEFLSGEQKEAIVDLLFKTNRKVTVKQLKEDYFKKIECFDSVEIIGVEDRFNASLGTYHDLLKIIKDKDFLDNEENEDILEDIVLTLTLFEDREMIEERLKKYANLFDDKVMKQLKRRHYTGWGRLSRKMINGIRDKQSGKTILDFLKSDGFSNRNFMQLIHDDSLTFKEEIEKAQVSGQGDSLHEQIADLAGSPAIKKGILQTVKIVDELVKVMGHKPENIVIEMARENQTTTKGLQQSRERKKRGGSAGGTGGSGGLSEADKAGFIKRQLVETRQITKHVARILDSRMNTKRDKNDKPIREVKVITLKSKLVSDFRKDFQLYKVRDINNYHHAHDAYLNAVVGTALIKKYPKLESEFVYGDYKVYDVRKMIAKSEQEIGKATAKRFFYSNIMNFFKTEVKLANGEIRKRPLIETNGETGEVVWNKEKDFATVRKVLAMPQVNIVKKTEVQTGGFSKESILSKRESAKLIPRKKGWDTRKYGGFGSPTVAYSILVVAKVEKGKAKKLKSVKVLVGITIMEKGSYEKDPIGFLEAKGYKDIKKELIFKLPKYSLFELENGRRRMLASATELQKANELVLPQHLVRLLYYTQNISATTGSNNLGYIEQHREEFKEIFEKIIDFSEKYILKNKVNSNLKSSFDEQFAVSDSILLSNSFVSLLKYTSFGASGGFTFLDLDVKQGRLRYQTVTEVLDATLIYQSITGLYETRTDLSQLGGDSGGSKRTADGSEFESPKKKRKV

SEQ ID NO: 492 - protein, 1519 aa, Artificial Sequence
  dCasFok, FokI enhanced SV40+bipartiteSV40, ancestral mutations in RuvC+REC1/2 domain, HNH deletion longer linker, 6His tag
  misc_feature: synthetic
MAVTPKKKRKVGGSGSQLVKSELEEKKSELRHKLKYVPHEYIELIEIARNPTQDRILEMKVMEFFMKVYGYRGEHLGGSRKPDGAIYTVGSPIDYGVIVDTKAYSGGYNLPIGQADEMQRYVEENQTRNKHINPNEWWKVYPSSVTEFKFLFVSGHFKGNYKAQLTRLNHITNCNGAVLSVEELLIGGEMIKAGTLTLEEVRRKFNNGEINFSGSETPGTSESATPESMDKKYSIGLAIGTNSVGWAVITDDYKVPSKKMKVLGNTDRQSIKKNLIGALLFDSGETAEATRLKRTARRRYTRRKNRICYLQEIFANEMAKLDDSFFHRLEESFLVEEDKKHERHPIFGNLVDEVAYHENYPTIYHLRKKLADSTEKADLRLIYLALAHMIKFRGHFLIEGDLNAENSDVDKLFIQLVQTYNQLFEENPINESGVDAKAILSARLSKSRRLENLIAQFPGEKKNGLFGNIIALALGLTPNFKSNFDLTEDAKLQLSKDTYDDDLDELLGQIGDQYADLFLAAKNLSDAILLSDILRVNSEITKAPLSASMVKRYDEHHQDLALLKTLVRQQLPEKYKEIFSDQSKNGYAGYIDIGIKHRKRTTKRTSQEEFYKFIKPILEKMDGAEELLAKLNREDLLRKQRTFDNGSIPHQIHLGELHAILRRQEEFYPFLKDNREKIEKILTFRIPYYVGPLARGNSRFAWMTRKSDEAITPWNFEEVVDKGASAQSFIERMTNFDEYLPNKKVLPKHSLLYEYFTVYNELTKVKYVTEGMRKPEFLSGEQKEAIVDLLFKTNRKVTVKQLKEDYFKKIECFDSVEIIGVEDRFNASLGTYHDLLKIIKDKDFLDNEENEDILEDIVLTLTLFEDREMIEERLKKYANLFDDKVMKQLKRRHYTGWGRLSRKMINGIRDKQSGKTILDFLKSDGFSNRNFMQLIHDDSLTFKEEIEKAQVSGQGDSLHEQIADLAGSPAIKKGILQTVKIVDELVKVMGHKPENIVIEMARENQTTTKGLQQSRERKKRGGSAGGTGGSGGLSEADKAGFIKRQLVETRQITKHVARILDSRMNTKRDKNDKPIREVKVITLKSKLVSDFRKDFQLYKVRDINNYHHAHDAYLNAVVGTALIKKYPKLESEFVYGDYKVYDVRKMIAKSEQEIGKATAKRFFYSNIMNFFKTEVKLANGEIRKRPLIETNGETGEVVWNKEKDFATVRKVLAMPQVNIVKKTEVQTGGFSKESILSKRESAKLIPRKKGWDTRKYGGFGSPTVAYSILVVAKVEKGKAKKLKSVKVLVGITIMEKGSYEKDPIGFLEAKGYKDIKKELIFKLPKYSLFELENGRRRMLASATELQKANELVLPQHLVRLLYYTQNISATTGSNNLGYIEQHREEFKEIFEKIIDFSEKYILKNKVNSNLKSSFDEQFAVSDSILLSNSFVSLLKYTSFGASGGFTFLDLDVKQGRLRYQTVTEVLDATLIYQSITGLYETRTDLSQLGGDSGGSKRTADGSEFESPKKKRKVHHHHHH

SEQ ID NO: 493 - DNA, 61 bp, Artificial Sequence
  CTLA4 gene 5'-3' fragment of figure 9A, set 1
  misc_feature: synthetic
cttgccttggatttcagcggcacaaggctcagctgaacctggctaccaggacctggccctg

SEQ ID NO: 494 - DNA, 61 bp, Artificial Sequence
  CTLA4 gene 3'-5' fragment of figure 9A, set 1
  misc_feature: synthetic
gaacggaacctaaagtcgccgtgttccgagtcgacttggaccgatggtcctggaccgggac

SEQ ID NO: 495 - DNA, 61 bp, Artificial Sequence
  CTLA4 gene 5'-3' fragment of figure 9B, set 2
  misc_feature: synthetic
ctgaacctggctaccaggacctggccctgcactctcctgttttttcttctcttcatccctg

SEQ ID NO: 496 - DNA, 61 bp, Artificial Sequence
  CTLA4 gene 3'-5' fragment of figure 9B, set 2
  misc_feature: synthetic
gacttggaccgatggtcctggaccgggacgtgagaggacaaaaaagaagagaagtagggac

SEQ ID NO: 497 - DNA, 77 bp, Artificial Sequence; identical to SEQ ID NO: 420
  SIGLEC10 gene 5'-3' fragment of figure 10
  misc_feature: synthetic

SEQ ID NO: 498 - DNA, 77 bp, Artificial Sequence; identical to SEQ ID NO: 421
  SIGLEC10gene 3'-5' fragment of figure 10
  misc_feature: synthetic

SEQ ID NO: 499 - DNA, 80 bp, Artificial Sequence
  ITGB3 gene 5'-3' fragment of figure 11
  misc_feature: synthetic
cgagcgcggcggctctgggcagcggtgctggtggtgggggcgctggcgggcgtcggcgtcggaggtgagtggggctcccg

SEQ ID NO: 500 - DNA, 80 bp, Artificial Sequence
  ITGB3gene 3'-5' fragment of figure 11
  misc_feature: synthetic
gctcgcgccgccgagacccgtcgccacgaccaccacccccgcgaccgcccgcagccgcagcctccactcaccccgagggc

SEQ ID NO: 501 - DNA, 63 bp, Artificial Sequence
  CTLA4 gene 5'-3' fragment of figure 12
  misc_feature: synthetic
ttcctgaagacctgaacaccgctcccataaagccatggcttgccttggatttcagcggcacaa

SEQ ID NO: 502 - DNA, 63 bp, Artificial Sequence
  CTLA4gene 3'-5' fragment of figure 12
  misc_feature: synthetic
aaggacttctggacttgtggcgagggtatttcggtaccgaacggaacctaaagtcgccgtgtt

SEQ ID NO: 503 - protein, 268 aa, Artificial Sequence
  PAM binding C-terminal domain 1108-1375 of scCas9
  misc_feature: synthetic
EVQTGGFSKESILSKRESAKLIPRKKGWDTRKYGGFGSPTVAYSILVVAKVEKGKAKKLKSVKVLVGITIMEKGSYEKDPIGFLEAKGYKDIKKELIFKLPKYSLFELENGRRRMLASATELQKANELVLPQHLVRLLYYTQNISATTGSNNLGYIEQHREEFKEIFEKIIDFSEKYILKNKVNSNLKSSFDEQFAVSDSILLSNSFVSLLKYTSFGASGGFTFLDLDVKQGRLRYQTVTEVLDATLIYQSITGLYETRTDLSQLGGD

SEQ ID NO: 504 - protein, 116 aa, Artificial Sequence
  PAMBD: 1228-343
  misc_feature: synthetic
ELQKANELVLPQHLVRLLYYTQNISATTGSNNLGYIEQHREEFKEIFEKIIDFSEKYILKNKVNSNLKSSFDEQFAVSDSILLSNSFVSLLKYTSFGASGGFTFLDLDVKQGRLRY

SEQ ID NO: 505 - protein, 13 aa, Artificial Sequence
  PAMBD LOOP 1330-1342
  misc_feature: synthetic
TFLDLDVKQGRLR

SEQ ID NO: 506 - protein, 122 aa, Artificial Sequence
  ScCas9 HNH domain, residues 793-914 of ScCas9
  misc_feature: synthetic
IEEGIKELESQILKENPVENTQLQNEKLYLYYLQNGRDMYVDQELDINRLSDYDVDHIVPQSFIKDDSIDNKVLTRSVENRGKSDNVPSEEVVKKMKNYWRQLLNAKLITQRKFDNLTKAER

1. A clustered regularly interspaced short palindromic repeats (CRISPR)-Cas protein or cas protein derived domain having reduced or abolished Protospacer Adjacent Motif (PAM) constraint or any variant, mutant, fusion/chimeric protein, complex or conjugate thereof or composition thereof, wherein at least one of: the PAM binding domain (PBD) and/or the PAM recognition motif, and/or the HNH-nuclease domain of said Cas protein, any fragment of said PBD, and/or of said PAM recognition motif, and/or of said HNH-nuclease domain, and at least one amino acid residue adjacent to said PBD, and/or to said PAM recognition motif, and/or to said HNH-nuclease domain of said Cas protein is deleted, replaced or substituted.

2. The CRISPR-Cas protein according to claim 1, wherein said Cas protein is at least one of Cas9, CasX, Cas14a1, Cas14b5, CasF, an ancestral Cas9, and Cas12a, optionally, wherein said Cas protein is at least one of Streptococcus canis Cas9 (ScCas9), Streptococcus pyogenes Cas9 (SpCas9), an ancestral Cas9, deltaproteobacteria CasX, Cas12a, CasF-1, CasF-2, CasF-3, Cas14a1, or Cas14b5, and wherein at least one PAM-interacting Arginine and/or Lysine residue of the PBD of said Cas protein is deleted, substituted or replaced.

3. (canceled)

4. The CRISPR-Cas protein according to claim 1, wherein at least one of:
(a) said Cas protein is ScCas9, and wherein at least one of: residues Thr1330 to Arg1342, residues Ile367 to Ala376, residues Glu1228 to Tyr1343, residues Glu1108 to Asp1375, residue Lys1337 and residue Gln1338, or any fragment or at least one amino acid residue thereof, are replaced, substituted or deleted in said ScCas9;
(b) said Cas protein further comprises at least one Non-Specific DNA Binding Domain (NSBD), said NSBD is at least one of: (i) added to said Cas; and/or (ii) replaces at least one of: said PAM binding domain, and/or said PAM recognition motif, and/or said HNH-nuclease domain, and/or any fragment thereof, and/or at least one adjacent amino acid residue, optionally, said NSBD is at least one Double-Stranded DNA (dsDBP) binding domain or protein, and any variant and fragments thereof, optionally, said at least one dsDBP is at least one of: at least one Zinc finger (ZF), Non-specific RVD from AvrBS3 protein family, Helix-turn-helix (HTH), SRC Homology 3 (SH3) domain, chromatin-binding domain (CBD) protein and Sticky-C (StkC), domain or protein, and any variant and fragments thereof;
(c) wherein said Cas protein is a Cas mutant or variant, and wherein said Cas protein mutant or variant further comprises at least one of: (a) at least one point mutation substituting aspartic acid residue at position 10 to alanine (D10A) and/or at least one point mutation substituting histidine residue 849 to alanine (H849A); and (b) at least one deletion, substitution or replacement of at least one of: (i) the HNH-nuclease domain or any fragment thereof, and/or at least one amino acid residue thereof; (ii) the REC2 domain or any fragments thereof, and/or at least one amino acid residue thereof: (iii) the FLEX domain, or any fragments thereof, and/or at least one amino acid residue thereof; (iv) the RUVC domain or any fragments thereof, and/or at least one amino acid residue thereof; and (v) any combinations of (i), (ii), (iii), and (iv); and
(d) wherein said Cas protein or any variant, mutant, fusion or chimeric protein, complex or conjugate thereof, is capable of binding at least one target recognition element.

5-10. (canceled)

11. A nucleic acid guided genome modifier chimeric or fusion protein, complex or conjugate comprising:
(a) the at least one Cas protein or any Cas protein derived domain, having reduced or abolished PAM constraint according to claim 1, or any fragment, variant, or mutant thereof; and
(b) at least one nucleic acid modifier component.

12. The nucleic acid guided genome modifier chimeric protein, complex or conjugate according to claim 11, wherein said Cas protein is at least one of Cas9, CasX, Cas12a1, CasF, Cas14a1, an ancestral Cas9, and Cas14b5, optionally, said Cas protein is at least one of ScCas9, SpCas9, an ancestral Cas9, deltaproteobacteria CasX, Cas12a, CasF-1, CasF-2, CasF-3, Cas14a1, or Cas14b5, and wherein at least one PAM interacting Arginine and/or lysine residue of the PBD of said Cas protein is deleted or replaced.

13. (canceled)

14. The nucleic acid guided genome modifier chimeric protein, complex or conjugate according to claim 11, wherein at least one of:
(a) said Cas is ScCas9, and wherein at least one of: residues Thr1330 to Arg1342, residues Ile367 to Ala376, residue Lys1337, and residue Gln1338, or any fragments thereof, are replaced, substituted or deleted,
(b) said nucleic acid guided genome modifier chimeric protein, complex or conjugate further comprises at least one NSBD, said NSBD is at least one of: (i) added to said nucleic acid guided genome modifier chimeric protein, complex or conjugate; and/or (ii) replaces at least one of: said PAM binding domain, and/or said PAM recognition motif, and/or said HNH-nuclease domain, and/or any fragment thereof, and/or at least one adjacent amino acid residue, in said Cas protein of said nucleic acid guided genome modifier chimeric protein, complex or conjugate, optionally, said NSBD is at least one dsDBP binding domain or protein, and any variant and fragments thereof, optionally, said at least one dsDBP is at least one of: at least one ZF, HTH, SH3 domain, Non-specific RVD from AvrBS3 protein family, a CBD protein and StkC, domain or protein, and any variant and fragments thereof;
(c) said Cas protein is a Cas mutant or variant, said mutant or variant further comprises at least one of: (a) at least one point mutation substituting aspartic acid residue at position 10 to alanine (D10A), and/or at least one point mutation substituting histidine residue 849 to alanine (H849A); and (b) at least one deletion, substitution or replacement of at least one of: (i) the HNH-nuclease domain or any fragment thereof, and/or at least one amino acid residue thereof; (ii) the REC2 domain or any fragments thereof, and/or at least one amino acid residue thereof; (iii) the FLEX domain or any fragments thereof, and/or at least one amino acid residue thereof; (iv) the RUVC domain or any fragments thereof, and/or at least one amino acid residue thereof; and (v) any combinations of (i), (ii), (iii), and (iv); optionally, said Cas mutant is a defective CRISPR-Cas protein devoid of a nucleolytic activity; and
(d) said Cas protein or any variant, mutant, fusion protein, complex or conjugate thereof, is capable of binding at least one target recognition element, optionally, said at least one target recognition element is at least one of a single strand ribonucleic acid (RNA) molecule, a double strand RNA molecule, a single-strand DNA molecule (ssDNA), a double strand DNA (dsDNA), a modified deoxy ribonucleotide (DNA) molecule, a modified RNA molecule, a locked-nucleic acid molecule (LNA), a peptide-nucleic acid molecule (PNA) and any hybrids or combinations thereof.

15-22. (canceled)

23. The nucleic acid guided genome modifier chimeric protein, complex or conjugate according to claim 11, wherein said at least one nucleic acid modifier component is a protein-based modifier, a nucleic acid-based modifier or any combinations thereof, and wherein said protein-based modifier is at least one of a nuclease, a methyltransferase, a methylated DNA binding factor, a transcription factor, a transcription repressor, a chromatin remodeling factor, a polymerase, a demethylase, an acetylase, a deacetylase, a kinase, a phosphatase, an integrase, a recombinase, a ligase, a topoisomerase, a gyrase, a helicase, and any combinations thereof.

24. The nucleic acid guided genome modifier chimeric protein, complex or conjugate according to claim 23, wherein said nucleic acid modifier component is at least one nuclease, optionally, said nuclease is a Type IIS restriction endonuclease or any fragment, variant, mutant, fusion protein or conjugate thereof.

25. (canceled)

26. The nucleic acid guided genome modifier chimeric protein, complex or conjugate according to claim 25, wherein said Type IIS restriction endonuclease is Fold or any fragment, variant, mutant, fusion protein or conjugate thereof, optionally, said nucleic acid guided genome modifier is a chimeric protein, said chimeric protein is any one of: dScCasFok, SV40 NLS; dScCasFok, SV40+SV40 bipartite NLS; dCasFok, Fold consensus, SV40+bipartiteSV40; dCasFok, Fold consensus, SV40+bipartiteSV40, ancestral mutations in RuvC+REC domain, HNH deletion; dScCasFok, SV40+nucleoplasmin, ancestral mutations in RuvC+REC domain, Scloop QQmutation HNH deletion, whole PAMBD replaced with LacI DNA binding domain; dScCasFok, SV40+nucleoplasmin, ancestral mutations in RuvC+REC domain, Scloop SpReplacement, HNH deletion, PAMBD loop replaced with Zinc finger; dScCasFok, SV40+nucleoplasmin, ancestral mutations in RuvC+REC domain, Scloop SpReplacement HNH deletion, whole PAMBD replaced with SSO7D; dScCasFok, SV40+nucleoplasmin, ancestral mutations in RuvC+REC domain, Scloop SpReplacement HNH deletion, PAMBD loop replaced with HMGN; and dScCasFok, SV40+nucleoplasmin, ancestral mutations in RuvC+REC domain, Scloop SpReplacement HNH deletion, whole PAMBD replaced with STO7.

27. (canceled)

28. A nucleic acid molecule comprising a nucleic acid sequence encoding the at least one Cas protein or any Cas protein derived domain, according to claim 1, t or any fragment, variant, mutant, fusion protein, complex or conjugate thereof.

29. (canceled)

30. A nucleic acid guided genome modifier system or a composition thereof comprising:
(a) at least one Cas protein or Cas protein derived domain, having reduced or abolished PAM constraint, or any fragment, variant, mutant, fusion/chimeric protein, complex or conjugate thereof, or at least one nucleic acid sequence encoding said Cas protein or any fragment, variant, mutant, fusion/chimeric protein, complex or conjugate thereof, optionally, wherein at least one of the PBD and/or the PAM recognition motif, and/or the HNH-nuclease domain, any fragment of said PBD, and/or of said PAM recognition motif, and/or of said HNH-nuclease domain, and at least one amino acid residue adjacent to said PBD, and/or to said PAM recognition motif, and/or to said HNH-nuclease domain of said Cas protein, is deleted, substituted or replaced; and
(b) at least one target recognition element, or any nucleic acid sequence encoding said target recognition element.

31. The system according to claim 30, wherein said Cas protein is at least one of Cas9, CasX, Cas14a1, Cas14b5, Cas F, ancestral Cas9, and Cas12a or any variant, mutant, fusion/chimeric protein, complex or conjugate thereof, and wherein said chimeric or fusion protein thereof further comprises at least one nucleic acid modifier component, optionally, said Cas protein is at least one of ScCas9, SpCas9, an ancestral Cas9, deltaproteobacteria CasX, Cas12a, CasF-1, CasF-2, CasF-3, Cas14a1, or Cas14b5, and wherein at least one PAM interacting Arginine residue, and/or lysine residue of the PBD of said Cas protein is deleted, substituted or replaced.

32. (canceled)

33. The system according to claim 30, wherein at least one of:
(a) said Cas is ScCas9, with a replacement or deletion of at least one of: residues Thr1330 to Arg1342, residues Ile367 to Ala376, residues Glu1228 to Tyr1343, residues Glu1108 to Asp1375, residue Lys1337 and residue Gln1338;
(b) said Cas protein, nucleic acid guided genome modifier chimeric protein, complex or conjugate, further comprises at least one NSBD, said NSBD is at least one of: (i) added to said nucleic acid guided genome modifier chimeric protein, complex or conjugate; and/or (ii) replaces at least one of said PAM binding domain, and/or said PAM recognition motif, and/or said HNH-nuclease domain, and/or any fragment thereof, and/or at least one adjacent amino acid residue in said Cas protein of said nucleic acid guided genome modifier chimeric protein, complex or conjugate; optionally, said NSBD is at least one dsDBP binding domain or protein, and any variant and fragments thereof and wherein said at least one dsDBP is at least one of: at least one ZF, HTH, SH3 domain, Non-specific RVD of AvrBS3 protein family, CBD protein and StkC, domain or protein, and any variant and fragments thereof;
(c) said Cas protein is a Cas mutant or variant, said mutant or variant further comprises at least one of: (a) at least one point mutation substituting aspartic acid residue corresponding to position 10 of ScCas9 to alanine (D10A) and/or at least one point mutation substituting histidine residue corresponding to position 849 of ScCas9 to alanine (H849A); and (b) at least one deletion, substitution or replacement of at least one of: (i) the HNH-nuclease domain or any fragment thereof and/or at least one amino acid residue thereof; (ii) the REC2 domain or any fragments thereof, and/or at least one amino acid residue thereof; (iii) the FLEX domain or any fragments thereof, and/or at least one amino acid residue thereof; (iv) the RUVC domain or any fragments thereof, and/or at least one amino acid residue thereof; and (v) any combinations of (i), (ii), (iii), and (iv).

34-38. (canceled)

39. The system according to claim 30, wherein said Cas protein or any variant, mutant, fusion protein, complex or conjugate thereof, is capable of binding at least one target recognition element, and wherein said at least one target recognition element is at least one nucleic acid target recognition element, said target recognition element is at least one of: a single strand RNA molecule, a double strand RNA molecule, a single strand DNA, a double strand DNA, a modified DNA molecule, a modified RNA molecule, a LNA, a PNA and any hybrid or combinations thereof.

40. A host cell modified by, and/or comprising
(a) the at least one Cas protein or any Cas derived domain having reduced or abolished PAM constraint according to claim 1, or any variant, mutant, fusion/chimeric protein, complex or conjugate thereof, or at least one nucleic acid sequence encoding said Cas protein or any fragment, variant, mutant, fusion/chimeric protein or conjugate thereof; and
(b) at least one target recognition element or any nucleic acid sequence encoding said target recognition element;
(c) at least one nucleic acid cassette or any vector or vehicle comprising the nucleic acid sequence of (a), the nucleic acid sequence of (b) or the nucleic acid sequence of (a) and (b); or
(d) at least one system comprising (a) and (b) or a composition comprising said cell.

41-42. (canceled)

43. A composition comprising at least one of:
(a) at least one Cas protein or any Cas derived domain having reduced or abolished PAM constraint according to claim 1, or any fragment, variant, mutant, fusion/chimeric protein, complex or conjugate thereof, or at least one nucleic acid sequence encoding said Cas protein or any fragment, variant, mutant, fusion/chimeric protein or conjugate thereof;
(b) at least one target recognition element or any nucleic acid sequence encoding said target recognition element;
(c) at least one nucleic acid cassette or any vector or vehicle comprising the nucleic acid sequence of (a), the nucleic acid sequence of (b) or the nucleic acid sequence of (a) and (b);
(d) at least one system comprising (a) and (b); and
(e) at least one host cell comprising and/or modified by at least one of: the nucleic acid cassette or any vector or vehicle of (c) and the at least one system of (d); or any matrix, nano- or micro-particle comprising at least one of (a), (b), (c), (d) and (e), said composition optionally further comprises at least one of pharmaceutically acceptable carrier/s, diluent/s, excipient/s and additive/s.

44. (canceled)

45. A method of modifying at least one target nucleic acid sequence of interest in at least one cell or biochemical reaction, said method comprising the steps of contacting said cell or biochemical reaction with at least one of:
(a) at least one Cas protein having reduced or abolished PAM constraint or any fragment, variant, mutant, fusion/chimeric protein, complex or conjugate thereof, or at least one nucleic acid sequence encoding said Cas protein or any fragment, variant, mutant, fusion/chimeric protein, complex or conjugate thereof, optionally, wherein at least one of: the PBD and/or the PAM recognition motif, and/or the HNH-nuclease domain, any fragment of said PBD, and/or of said PAM recognition motif, and/or of said HNH-nuclease domain, and at least one amino acid residue adjacent to said PBD, and/or to said PAM recognition motif, and/or to said HNH-nuclease domain of said Cas protein, is deleted, substituted or replaced;
(b) at least one target recognition element or any nucleic acid sequence encoding said target recognition element;
(c) at least one nucleic acid cassette or any vector or vehicle comprising the nucleic acid sequence of (a), the nucleic acid sequence of (b) or the nucleic acid sequence of (a) and (b); and
(d) at least one system or composition comprising at least one of (a) and (b).

46. (canceled)

47. The method according to claim 45, wherein at least one of:
(a) said cell is of at least one organism of the biological kingdom Animalia;
(b) said target nucleic acid sequence of interest is and/or is comprised within at least one of: at least one gene encoding at least one tumor associated antigen (TAA), at least one gene encoding at least one immune checkpoint receptor proteins or ligand, at least one gene encoding a protein involved in at least one congenital disorder, at least one gene encoding receptors for at least one viral antigen, at least one gene associated with at least one inborn error of metabolism (IEM) disorder, Immunoglobulin locus, T cell receptor (TCR) locus, safe harbor site/s (SHS), and any coding sequence or non-coding sequence involved with at least one pathologic disorder;
(c) wherein said cell is of at least one organism of the biological kingdom Plantae; and
(d) said modification of at least one target nucleic acid sequence of interest in at least one cell is performed in at least one organism of at least one of: the biological kingdom Plantae and the biological kingdom Animalia.

48-50. (canceled)

51. A method according to claim 45, for curing or treating, preventing, inhibiting, reducing, eliminating, protecting or delaying the onset of a pathologic disorder or condition in a subject in need thereof, said method comprising the steps of administering to said subject an effective amount of at least one of:
(a) at least one Cas protein or any Cas protein derived domain, having reduced or abolished PAM constraint, or any variant, mutant, fusion/chimeric protein, complex or conjugate thereof, or at least one nucleic acid sequence encoding said Cas protein or any fragment, variant, mutant, fusion/chimeric protein, complex or conjugate thereof, optionally, wherein at least one of the PBD and/or the PAM recognition motif, and/or the HNH-nuclease domain, any fragment of said PBD, and/or of said PAM recognition motif, and/or of said HNH-nuclease domain, and at least one amino acid residue adjacent to said PBD, and/or to said PAM recognition motif, and/or to said HNH-nuclease domain of said Cas protein, is deleted, substituted or replaced;
(b) at least one target recognition element or any nucleic acid sequence encoding said target recognition element;
(c) at least one nucleic acid cassette or any vector or vehicle comprising the nucleic acid sequence of (a), the nucleic acid sequence of (b) or the nucleic acid sequence of (a) and (b);
(d) at least one system comprising (a) and (b);
(e) at least one host cell modified by and/or comprising at least one of: (a), (b), (c) and (d); and
(f) at least one composition comprising at least one of (a), (b), (c), (d) and (e)); optionally, wherein said subject is of the biological kingdom Animalia or of the biological kingdom Plantae.

52-53. (canceled)

54. The method according to claim 53, wherein said subject of the biological kingdom Animalia is a mammalian subject, optionally, said pathologic disorder is any one of a proliferative disorder, a congenital disorder, an immune-related condition, an inflammatory condition, a metabolic disorder, a disorder caused by a pathogen, an autoimmune disorder and an IEM disorder, optionally, said congenital disorder is any one of adRP and PSACH, said proliferative disorder is at least one of non-small cell lung cancer (NSCLC) melanoma, renal cell cancer, ovarian carcinoma and breast carcinoma, and wherein said a disorder caused by a pathogen is a viral disorder, said viral disorder is a Foot and Mouth Disease.

55-56. (canceled)

57. The method according to claim 51, said method comprising the step of administering to said subject a therapeutically effective amount of at least one host cell modified by, and/or comprising: at least one Cas protein or any Cas derived domain having reduced or abolished PAM constraint, or any variant, mutant, fusion/chimeric protein, complex or conjugate thereof, or at least one nucleic acid sequence encoding said Cas protein or any fragment, variant, mutant, fusion/chimeric protein or conjugate thereof or of any composition comprising said cells, wherein said cell is of an autologous or allogeneic source.

58-60. (canceled)
